United States Patent Application Publication US 2015/0354009 A1 - sequence listing, part 7

SEQ ID NO: 164 - DNA, 309703 bp, Homo sapiens
gattgcatggagacactcaggagcacaaattgcaccacggggttagtccatcacggggttagtccatccaaaagcaaggaggcagcctttggtacccctgtgccagtcaatattcattaaagggcagttttttcaaggaagtcggagctagctgctggacactaacagtcaaatctcaaaggagctgggagagaaatgcacaagcaggtaagggggttctggttaggggacctacaccatccactatgcgtttatattttagtgcacctacagtctatagttgggtaccgaataccatcagttgagttgctttgaattcacactcgtgtattccccaggcttaattaagagcacgtggtgaatgggaggtggtaatgactcagtataagattacctagaggctgaatacctagtgggccagaaagctgttttgtgaaaagataaaggttagattttgcctttggtcagttatttggaattatacccaacaccttacttttccaatcctttagttaacacctactataaaaatgctgcctaatataattgcaatgataaagcctatgtaaactgtagttttatatgagttgtttactcctaattatggtgttgtctgtcaatatggagttaccaggtggtgtgggcagtcacctagaggtttttccatctgaaaaagattgctttaagatcatggtgttttggactctctcactatttttttttttattctttatcactgaagaaagaatgaggcctatagtagtatatagaacaccttattaaaatgaatcatttacacacatcttttatctaaaaacaacattcaataagtgtgaattgaatcaaacctgttgggctgggataaaagatgtaaaatccaaccacgtgattctctcagataaatgccacaatacacattcctgaatatgttggatttagtaatatggtgcatttagtaaaagtgttttgttttttcctaataaggcctttttgcttgaggaaacaaaatgcagaaatttttgttgttttccttctgatttgcttctctttgttgttttccttctgatttgcttctctctggttgtgtttatactgactactgaaataacagagttcaatacccagacaactggttgaatgttaaatacagtatgtctctcccaccattgtgtatatgaaggggtatcagtgttttatttgaaacagtacgtcactttgggttttatcctatgattatctaaattagagtctatatttaactgcaatgacaacagccatagcaacccatggtttagtaaagccaaggataactttaaaaatcacagatgaaagagatctgaggttccctcttatgtacactcttacatggttttgtttactagccacattttagagaaatatgagtatttcatccagaatagaatacacaattataattcagaaggaaaacatggaatgaaagtaaaaagaatgagaaaggcaattgaaagcaaacaagaattctagtataaaaatgtgttataaaatgtttgaaaaatatttaaatcattaaattgattccattcctaacaaagataacctttaagaaattagataactaatgacaagaaataaagtttcatttcatgggcctttaagaaaccataatttatttatagacatttggaagcagtcagtatattcttttgaccataggcaccagtcttaaaaccatcacatctctttcagtcttcgtaggggcattgacaacagagtttcagtgtagttcctaattaaagattaagaatactttgaaaatataaaacaaatgtatattttttaatgtatcatttggggccttaaccattgaggaaatcatagagaagtttgtcgtgagggacaaggggaatataccacacgtttacaggaaacaaaaaggtaagaataagttttataattttattctttggaggtcatgaaaaaaatttcttaatatctttgcaattcaccagttgtattttctcctagaaaagaaaatgtagcaaatttatttggggaaataatatatttaaacaatgtaatgcatgccatataagaaaatttttagggttttaaaattagtatagctgtgttgacttatgaaaataaaaaaggtatcttgtctgtccagaatcattaggccataagtcatttggaagataaatattttctaatgagttaagaatttatacctttactcactataaggatttgcttatattttaaatattttatagaagttttttctaaaatattgtgtatgaatgtgtgtgtgtttttagagtatggtgtgatgaatataattcgagcatcatgctgagagcaaaaatagggcttggcattgatggatcaggattctagttttaccttttagcagcttttgggaaagttgctaaaatagttctgagtctcaaaggttttatttgtttttgtttattttgttttagtctgtgatgtagggataatgatatatttcttgggattgttgtaaaaattaaatttgattgaaattacacaagttccctggtactcacccattccttagatgacttgaaaccatcattgtgaacatcagttaagagatttgtttgaccatcttctaattaagactgaggttttttagttcctttgtctgattaaacattttttctgtttcttttgtcatttctcctccaatttgctccctctaatttacagtaagccttgaaaaacagatatatattttaaaaaggaataaaaatacaaccatccaaaaagccaactaaaaagtaattctttgaaccactatactaattgtgtacaaatgtgctgttcgattcagtaggtccagtccacattttaattttaattaagagttcagttcttgagtttcacctttcaaatgggtgataaccacagtagctagtagctgctgtactagatagcatagagaagcatttcgatcatcacagaagattctgttttacaatgctggtctacaatgtctaaagctctgaatttgtgttgtggaattctgaagatgagtggaatgtggctcttgctttcaatgtaactcaagtctgtgaaagaaaatacttaggggaaatgtttggaaaatatgaaaaattcagtgatgtggatgatgactatttgacaaacattggggagttagcgtaaacagttcaggataaaaggaagatagaaatgactgagctgaaacctaaagcatattagtgatatttgtgaccttcccagtgcatgaaagattataaaacattccaatgtgggcccacttgcaagaggaggcaaggggaaggggcaattctatttgtatccagaatgttgtatttttcttttaaaatgttctgtattaaaatatttttactataaatatgtataatttcaataatacaagttaaaaatttattttaaagaatcttgacctttgtgtaatagcattgactttctgccccttttctcatctctgaaaactcttcctggcatcccttcccatttttgtcttttagctctcccacactaagggaggcatctaccctcctgtccaagcttcatgtacgctcgtgagcttgaatgccgtttctttttatctcaaatatcacctgatattttattctttttctcttctctcttcaaacataccttctctatgatttttcccttcagtctataaatacatgtaaggtttctgaatcaaccaaccccctgttgatcctacttttctgtcagtctcccttttccaccaaattttctaaaaacatggcttcaatttgttgtctccaattcctcacttataatttactcttcaactctgaaattgaatttttcctctaagcatgaaattgctgtatcatttaccaaggtctccagttattgtcatcaacaattaatcttgtcaattctagcagaccatttatagtttatctttttcttgggaaatatgttgatcactccgtttacctatgttaatgacaccacaatctgtcttatgtatatatgagacagagatatctgagcacatctacaattgcccattaagtaaatattttcacaaggatttgccgtaggcaattcaaacttttctttaacatgaactggtcatctcaccaaaatttcctcctcctgtcccaggtagcaatgattgatacctccttaaagtccctctaatccaatccatcctttccacccccactatcattgacttcatgcaaatgtaacttactcacaaagtctctgactgaatgttcgcccttctccaatccattgtccacgctgcctcctgggtgatttttccagtatcaaatcagctgtatcagttccttttctgtttcctttatttttaacttgcttttctgctacagctctctgatagtttctctcacttttaaaaatacctattgcctaaataaataattttttctttttaagagaaagcaaacacagaattttcaaggttttagcactacattgagaatctcctgaaaagcatccaaatatgacacttttccttgagtttcaccttcccttgagggtctgtcacagtcacactgccaccgccaacatgctaggttctgaagatgccacttctctgataaattttggtttcagacaatacctaatctctttacacaatactcagagaaggaccaagtataaatataattataactaaatgttataaaatatataattaaaattttagggaggactgtaagaaaatcagcaagggaaatcacaaaagtaacacttactggttttattattttaaatcttgctgccttctttgtttttaaaaagctctatagatctcttaggccaacgtgttacatgaagagaaagtaggcttctcgcatagctgttcaactgctttcctagtttatgaataaataagccaagatcaatagagtgctgtttccattccctctctattggcttgtgattgtctatgcagaggctgatgccaggctctggcagaacattaatgtggactcacagttatggatacatgattcacatttaaaaatccaataagaaccagagttggcaggcacgagcctggcagattggcaattattttgacgatgtgaaagttgttttttaactttcctataaaatacatgtgcatgatatgacgctgcttttagaagaattcaatgaatatttcgtggctgttgtgaatagaaagttgctcttgataatgcaactaggactagtctcaagacacaattggctcagtggcctaattactgtcaatgccatcagtgagaagggtttattattagttattctcaaattactatcttaaataatttccaatattctatcaggtcgtggcagagaactccacacagaaaatcaatcagcttaaaaacccgaagacaggttttgcagttaatttgtatgggtttgggtaaaggggaaccaggagacatgagaatgccactttaataaaaactacatggtcacatggtcattaattatcttatgtcttaggctgggcacagtggctcaggcctataatcccagcactttgggaagatgaggtgagagcctcacttgagcctgggagtttgagaccggtctgggcaacgtagccagaccccaattcacaaaaaacaaaaagaattacctggctctggtggcttgcatttatagtcctagctactcaggaggctgaggtgagaggatcgcttaagcctgggaagttgaggctgcagtgagctaggatcactccactgtactccagcatgggcaacagtgagaacttgtctctcaaaaatatatatatataaaaattataatgcctcattaaattaaaatttttccttataaaatgagactgtcccataagaagtatgtgaaacattatttaatttctttagttcacatgtggattaaatctttcatgtcacgagcatatctgcattggcctatgtgtgaacctatagtgatgtttatgttcataataatgatcttgaaacttttcatagaaaatccttatattttttaagacattgttttgtatagtttcaatgttaagattaatttaaggttaaaattaatttaattgcaaccagagtattttattttattttattttgaaacgaaatcttgctctgtcactcaggctggagtgcagtggtgtgatcttggatcttggctcactgctacctctgcctcccaggttcaagcgattcccctgcctcagcctcccgagtagctgcgactacaggcatgtgctaccatgcccagtgaattttttttttcttttttgtatttttggtagagacttggttttaccatgttgaccaggctggtcttgaactcctgacctcaagtgatctgcctgcattggcctcccaaggtgctgggattacaggcatgagccacagcacccagccctcaaccagagtctttttttttaacttttaggttaaagggtacttgtgcaagatgttacataggtaaatgtgtgtcatgggggtttgttgtacagattatttcttcacccaggtaactagtacccattagttatttttcgtgatcctttctctcctcccaccctccaccctccaaaagtctccagtgtgtgttgtttccctttatgggtctctgtattctcatcatttagctcccacttataagtgagaacatgcggtatttggttttctgttcctgcattagtttgctaaggataatggcctccagctccatccatgtccctgcaaaggatgtggtctcattctttttcatggctgcatagtattccatggtatatatgtatcacattttctttacccattctatcattgatgggcatttgggtttattccatatctttgctattgcgaatagtgctgcagtgaacacacacgtgcatgtgttttcataatagaacaatttatattcctttgggtatatacccagtaatgggattgctgagtcaaatggtagttctgtctttaggtctttgaggaattgtcacactgttttccacaatggttgaactaatttacactcccaccaacagtgtatatgcattcgtttttctccacaaccttgccagcatattattttttgactttttaattatagccatcctgattggtgtgagatgctttctcattgtggttttgatttgcatgatgttgaacttttttttcatatgattgttggttgcacgtatgtcttctttcaagaagtgtctgttcatgtcatttgcccactttttaatggcattgtttttttctcatcaatttaagttctttatagatgctagatattagccctttgtcagatgcatactttgcaaaaattttctcccagtctgtaggttgtctgtttactctgttgattgattcttttgctgtgcagaagctctttagtttatttagactccatttgtcaatttttgcttttgttgcaattgcttttggtgtgtttgtcatgaaatctttgcccatgcctgtgtcctgaatggtaattgcgtaggttatcttccagggtttttacagtttggggttttacatataagtctttaatccatcatggttaatttttgtatattgtgtaaggaagaggtccagtttcaattttctgcatatggctagccagttatcctagcaccatttattaagtagcgtatccttttctctattgcatttttgtcatttttgtcaaagatcagatagttctaggtaaatggtcttatttctgggctctctattctattccattgttctatgtgtctgttttggttactgtagccctggtagtacagtttgaagttgggtagtgtgatgccttcagcttttttttttttttaatattctcttaagagtttattataaaccagtttcatgggccacaaggaaataaaaggactatgtacagcctttcaggaaagaggcagggagctaggagggccaagatgagtctagggtcttgatgggcacattctcaggggatggggctctgtaaggaaaaccagacaatctggagagactccgtgaacagcagcataacaaacaaataggtctgtggtaatgtggccctgaggagttgagcccatgtctctgtggagctacttccatactctgtggccaagggtcaaagacggcctcgcatcccatggggaggaggctgcattcccagaggggatatgcccactggagtctgtctcccaggggagatccccactgggggaccataggaggcctgacaccaggaggtaggcccatcacaccttcaagagaaaagccccaagaatgtaactcaagtgtctgtcttggaaagatatcaagaaactataaagctgtccaccaagttctgagataggtggacaattccaccctctcagcacctcctagaaaactgacatttgagcctaacacctagggttcccaatggctttgctctttttgcataagactgccttgactttagactgccctggctattcaggctcatttggctccatatgaattttaaaatagatttttctaggtctgcaaagaatgtcagtggtagtttaatgggaacagcattgaatctataaattgctttgggcagtatggctgctttcatgatattgattcttcctatccatgagcatacaatgtttttccatttgtttgtgtcatctctgatttttttgcgtagtggtttctagttctccctgtagagctctttcgcttcccctgctagctgtattcctaggtattttattctttttgtggcatttgtgaatgggagtttgttcatgatttggatctcggcttgactgttgttagtgtataagaatgcaaccggagtcttttacaattctaaaacgagtattctttgaattgtaaccttcgtcaacaagtatatattttctgaatcacagagctaaaaagtacctttgaaattatgtagcttattgatttacaaatctgtttatggatcctcacctggggaggatttttgtttttttaaaaaagatagatctctaggacttacccaaagctgactataatttgagaattagggttcttaagaaattccttaaatatgacaatgctgatgaatggctagtttaggaaactaagaataaatttattatttccagtttgtagaagattgaggcagaccaaaggaggtaaagtgacttccccaaataacagcagatctgacacaagattctaagcctctcaacttctaaacctgtggaatttctatgaaaaaaatacagaattttctaagttatctgaaagacgtgaattagctaaaagaattacccaaaacagtggacaatgtgtagtttctgtgatttcatataatgagtgtctaatagatataaagttgtttgcttctttcttaggtgctattggtccacattctgagtaaattatgtgtttgcttgaaatttgctggcagggattgaggccatgccaacaaacgttacttgtgacaagagcaagcatattaatgtcaataaaatattcatattataatagtattttactttcctgtaattttctaagaaactcaatgtgatattttccttcaacttccagccttgtggtttttataagctggattttcaagtgacattgaaatgaagcattatgttctaaaaatatattcacttgttttataatacaacattcctgagacatgagcaattactttttatgctgctgcaaagctacaatcatactaaattctagccaagtcaataggttcaactacagcagccattacatgaatcataaatcatggaaaaggacccctataattcattgcgtttttttttttatctctgaagaaccttgcattaataaagcagctaaaatctatgtaatcttcattaatttctacctgttgacacccttcagttttaccttagaacccactgttgataataagcactctgaaacatttgtatggttcagaattcagctctaagtgcatttggttgaacagcattctaggtctttaaaaaatgatttgtttacaatagtaattatttattctcatgctgaattgaaattgcagttctctccatgggaaaccatcgctattccattatttattggttctagcgagtacattaaactttgataaagtaggcaatccttttattttgccattgtaaagtgtcttctaaaatataccagccagtgcactttcctgctcttaaatgaaaagcaggggaatgtctctctggccattctgtcatcagtgtgctttgaagctttttatgaggatcaataatcatggtatatgccagagaagtaaagcctttgaagaacagagtactagctctgttttgaaatagcagattcaggttcaatgcaaccactgcaaaatgaggggcagaaatagaacatctccaaggaatttttagctccaaaggactatatgattttgtaaatgagaggttggacatctgtactgactcttgtcgatcatcttaaatttctagcatcaacctcttctgtcatctttagatttctattagaagtagagaggatattctaattaactgaggtttaatcttaattaactagtaaaaagaataattaatcagaacactgattcgttgagcatgccaactgatcaagtaacgtgaacactatctgtgcaacaaacatgaaaagaaatgcctgataaaactcattcttgttctatgctcctctcatacctgttcatgttctcttaccttgtctaccattcttttattttcttttgtttgttgagaccgggtctcactgttgcctgagctggagtgcagtggcatgatcatagcttacagcggcctcaaagtcctgggctcaggtgatcctcctgcctcagcctccggagtagctaggactaaaggcacataccacaatccccagctcttaccattcgtagggaaagaaatagagcagaaatgactcagactttttacagggcttcagatagttttgtccttcttttcctaatatgtagtcagaaaaatgggcaaaaataattagataaataacctaatctatttaagtttgttctgagatgttttatagatattttgtagaatcactttgttacaaatgctttgaggatatcctatgctattattggttgtgttttaaaaccatgcttttgccaggcatggtggctcatgcctataatcccagcactttggaaggctgaggtgggcagatcacttgaggtcaggagttcgagaccagcctggccaacatggtgaaacccgtctctactaaaaatacaaaaattagctgggcatggtggtgcacacctgcagtcccagctacctcggaggctgagacatgagaattgcttgaatctgggagacagaggttgcagtgagctgagattgtgccactgcactccagtctggtcaacagaacaagactccatctcaataaataaataaataagacaaaataaaaccatgtttctaaatatggagtacattttaaacataaaatatgtgtaagatataaggaatgatgattcaaatgcacactgtgtccaacatttggctttagaaatggttatcatttctatctttgaactatcctatgtcattctgaatttcattccctttcctctcagctcagaggaaattaaatcataaattttgtgtttaacattcctttgctttgctttttgacttttaccatatatctatgccaaaacagcgtattgttttacttttgcatagttctacatagaaattacattgcacacaattgtctattatttgctttttaattttattacacattatgttcctgaaattcattcatattgttgtttgaggatacagtacatttattctcacagtcatccagtgccaacacaatgtgaatgtagcaaaatttatttacttgttaatgtacacagtctacttctgtaactattcaattctattatgaatatttttgttcaaatggacatgttttcaaagttctctagggtaaatactcacctgttgaattactaagttacaagttcagcttcgttaaataatataaatttgttttccaaaatgcttgaagcaattgacattcacatcatcgttctagaaaagtttaattcacatcacatctcactaacccttaatattgtcagactttcatagttgtcaattttgtgagtatggaaatgtatttcatggttattttaactttcatttccccaattaatgtttaggtagaatataattgtgtatgtatatttgtttttcatgattcctcttctgtgacataccttttcatggcttttgctgcttctttctgttaggtcgtatagtcttttaatagacttacaagatttcttcatgtattttggatgttacctcatcttctttcccctagttcgtgacttgtgttttactttatcgatggtatcttttgatgccataaaattgtattaatcatttcctgtgtgtgtgactttttgcatcttatttatctttccctgacaacataaagatacatttcatatcatatatatattcatattatatatgaatatattatatattcatattatataatatgaatatgaatataattatgaatatataatgtattcacatataatatgaatatataatgtattcatatataatatgaatatataatgtattcatatataatatgaatatataatgtattcatagattatatataatatgaatatatataatataatatatacaatatatataatattgtatatatatattatatgtatataatatatatacaataatatatacaatatatacaatatatacaataatatatatatattttgagatggcgtcttgctctgtcacccaggctggagtgcagcggcacaatctcagctcactgcaacctccacctcccatgttcaagcgattctcctgcatcagcctcctgagtagctgggattacaggcacctgctaccgtgcccagctaatttttgtatttttagtagagacggcgtttcgccatgttggccaggctggtcttgaactcctgaccccaggtgatcgacccgccttggcctcccaaagtgctgggattacaggcgtgagccacgatgttcggcctcatcttttaaaagttttatagcttaaattacacatttaagtcttatacagctaatagttttatatgtaagaatttaatttttttgctttcataacaataaacagtcgtcccagtaccatttattgaaaactctttttccactaacctataatgccagttctgttataaaccaagtttctgaatatgagtggggctctttttctggaggggaaaaagcaatgtctgtactgttcagttggtttatacctgcaccaatactagattatcttaattactgcaaactttatattactctcaatacttgatataaagaaatttttcctacatttttatcttctttaacagtattttacctattcttgggtctttgtacttctacatatatttttgattcagcctttcaaattccaaaagaatcatcttttggaaggtcgactgacattggtttcaaactattgatcaatttgagaagaatttctatctctacaacattaagactctgaattcattattcatggtatattttttatacagtgatgtgccacatagtggcatttcaatcagcaatggactgcatatatcatgatggtccaataagtttataataatgtatttttactgtacctttttcatgtttagatacactaagataaacaaatacttagcattgtattgcaattgcctttagtattccatacagtaacatgctgtacagatttctagcctaggagcaatagcctactacataaagcctaggtgtacagtaggctataccatctaggtttgtgtaagttcactccatgatgtttgcctaatgctaaaatcgcctaactacacatttctcagaatatatccctgttgttaagtggtgcatgactttatcttggttttttaaattttttcagatgattatgtacatctataaagattttgtaacttttgttaaacttttactatgtattttacatttttaatgatattataaatgaaaattacattttaagttaatagactacattttttagaacagttttagatttacagagaaattgagcagatacaagaaaatttccatctacctcaatcctactccacacagtttccccagttattaacatcttacattagtgtggtacacttgctcccattaatgaaccaatattgatatagcagtgttaatgaaggttcaccctttattcagatttcatttgattttacctaatgtcctttttctgtttcaggatcccatggaagacaccatgttacatttagtcatcatgtctttatagggtcctcttggctgtgacactttctcagactttccttgctgttgatggctgtggctatttagaggattacttactggtcagatatttttgcagaatgttccgcagacaaaattcatctgattttttttatgaacaggctggggctctgaatctgggggaggaagaacacaggggtaaagtgtcactttcatcatatcatattaagggtgcttatctctacatgatttataactgttggtataacctagatcatctgtctgaagtagtgcttgtcctttttctccattgtaaaattattctttcttccccagaaccctcattttgtacttttagaaggaagtcactatacgtaacccacacttcaggatggagagttatgctacctccaaaattacattttcctttctttgagacaggggaggaaagcctggctgagtgcagtcatgcaatcgtggatcactgtagccttgacttcccaggctcaaccaatcctcctgccccagcctcccaagtagcttgcaccataggcatgtggcaccacacccagttaacattttaaagtttttgtagatatggggtctctccatgttgcccaggctggtctcgaattcctgggctcaagcctcccaaagtgctgaggttacaggtgtgagtcacagtgcccagcccaaaattacattttctaaattgcattattatcattttttgctagtgaacagaaattagtatatttattttttataaccagaaaaattgctgaactctctcattaatatttcttttttatgtttcttaatatagacaataacaccctctgcaaatagtattcattttggttcttgcattttgatacttctttctttttatttccttactctgttggccagatgccccagtacaattcttaatggaaatgttgatattgaatatccttgtatttttcctgttttatccatatatctgctttaatttaaagtgtaccttggttgattgtatcctcaagaaccttgcaaaagcaaatttgggaaaacagattttttaaaccaaatgcggtagattatattattttgcagcgattaattttttttccaaaattcacccttattagcatcaagctctggttaagttacctaaaacacaacgacagttgaattttgtgacagagctaggaagtatacacctttgtttttgtgcaactgtcacctctcctgcctactgtgtatccacaatacactttccattatttcattttctctttttaactcctgtcatctctactaagattgaaacctgccttaattcaatttctgctccctaaacaggcatcctgacggtcatttacatattggagaataagacttttttcaaaaattgcagctctagtaatatttctatcttactaaaacatcttaaatgtgttgccttaaagttctgaacctgatgttcaaaggcctcttcaaaataatgtcaatgtttattttttcaacatttatcagcattgccctcttaaatttctgaagatatatttattacattcacagtatgatttgatagtaaagtggaatttaaaatggatttttacctcatacaagtaatgtttttcagaaaacagagaggatatcacccttttaaatgttctacagtaatatgttaatctgctcacaatgtttaacacactaatcccagtaagggaaatcagaaaactgtttttttaacctgctgctgacctattgtactctcttgtgcaagtctgcctgttcttgtttgctttcctgtaaaacagtaatcataaaatgtttaattcttgactatcaacaggtgaattatattcattgtggataaccttgatttaaaatccttgttggcttaattacacagagtagtgggaactatctttagctgaaattatatactaactcttacttactttcactctttctccaagcaatttactgcccagcaagaagcactttttatgaaaaaataatattttcatatttccagaaatctctgaacaattatttcttagtaatatttttaagctgatacatttttcttactttgagaggccatgcttgttatctctagctcagtgtgaggagtaaggatgagaggtgtcaagaaaaaaaattaagtaatgttttctcatctaatcaataattttattttttgaaacagaagtgccttgatacttaatggtggacctatcaaactatacatatttacctgggatcatttcaaatttagtttgaatgtggattacagctttcctatttctgtaaccttggttatattacttaatctctctcaacctctgtacgctcatgtgtaaagtgagtattatacatttttgttttgtacacaaagtaccttaaataatgactatagagcacttagcattgttggagaaaccttgaacaaacattccttaagtaccaactgttactatttgcttaataaattaaaagtccaggccattaaacatgcacataatctcagttttagaaatactcaatttctgttgattctttgaagagacaaagaattatgattacttcacattttccatggaaggactgtaaacctctgaagtatgaaagatttttgtttgacccaaacatatatattctgttttgtataaggaattcacttttaagaaatcatgtacaaattgacatttttaccattaaatgaattttaataagcagaagatttcaccatttaaaaattatttcttatactatgtagccacacttcacttagaagatgcatcagacatgtggaataataacatttggaatagtcagagttagaaaacatgagaccagaggttctcaagtgtggtgcttcaactgcaccatccgcatcatctggggccttgttagaagtaccaaatcttgggccccataccagacctactgaatcacaaaccctgtggttggaaccaaccactctgtgtgttaactagtcctccacgggattctgatgctgctgctttctgggagcaattgcattaaaaataccaaaaggtgagaaacaacactgggatgcaattgtaggaggaaggagggagtgatgatatcttctttgcttgacgaaaatgtgagatagacactacttttgagctggtaacttgtccttaagctgagaggcaatgcagaacagaaacatttagtctggaaaaattaggaagtatttccaggaaaacaaggtgggaacgagagttaggtctccacatcacatttagggagttgggagttctttagaattcacagaacagaggacaagagagaacttcaatgtatttagttgaaaatatttctgtaagtttctaggctgcagagtcggttttaaaaaatcaaaaagtcactttgtggtttagcatataattaagaattttccagcatctaatggttcaatagtgggaccacgtcattcaaaagcagtgatagaaaactcaagatggcgtggggaattgctattctcaaggtcttaggatttttaaattaaattcctaattaaagtaagataaagaaaaaggtgaagtctacatctcaacaattaacataggtgtaaattctttaaactcagtaatttactattcctatctcctggtcactaagaaatatttaaatatgtattccaaactgggtggattagaactaacctacttttaaggtattcttttcctgattgaattatgtgaaggtcagaatttaaaacaaacaaaacccccaaaatgctactaacagatgaacgtgcgcatttcaaccagagtgtgctgctttgcttcactgagcaaattcgtgattgccctgaggcaaagcaattccctttcactcctgaccctctgctctcagccctgctttgcctgctatgaggttttttgagttagaaatatgtgatcctaagcatatgtttggaaataatatcattctggcttcaaggcataacttctgttacttaaattgtcaacttgtatgtgcatgttaagacagaaaggtctaggaactattcggtatcattcagcagcctgctgatctgttctgctaacactgtcaccttctaaggagaaaacagacacagggttttgctttgttttttaatattttttttctcttcttcctttgtctttagtaagtattcatctttctaatcagggcaaggaagtcaccagggttataagaccatttagatcttattaaagctttggggattaaatttatcttagatgtgaacatcaaatataatccctgaagtgtattaaaaatggttttacccatcactcatttctaaaaattgaatttgtctgttaatttttaccaacatgctattttttaaaactgatttttaatccccatacaattgtgtgattcttccagacttttcttcatgtcactcttgaatttctttgggcaaacttctcgccatcttcaagctccttacaccttctctagttaactgacactcatcctcttcatgattccacctgcccctcagaagcccagcttgtggagaatgctccttctctcaccttcgatgtgccacaggatctcaaaacaagggtggtgctatgatttgaatgtgttcttcaaagtccatgtcttagaagtgtaatccctaatgcaacagtgttgagaggtgggacctttaagaggtgattacatcaggaggactctacccttataaatggattaatgtcattatttcaggagtgggtttgttagcacaagactggggtccttttcataaagattggctagctcctctctctctcccaggtgatgtctcctgccttgttaagatgaagcaagaaggtcctcataagattctggtctttcgatcttggacttggatcttggttcagcccccagaaccatgaaccaaataaatttttgtttggtataaattgcacggtctcacatattctgttacggcagcacaaaatataataagacagccactaaggtggcttccaaaccactatgcttgctttctttaaaaaataattttaaatctaattatttttatcaaaatgaaacatgaatatactttaaatttttaaatagttttacaaagcttattatttattataatttaaaaaaaaaacagtagtctccaaaataccaacccacatccccagtccagagataacactttcatttcttaactttttctttttggaatttgctaccagttggctaactagcatctctatataatttttttcttttccttccattttttatattagctattgacttcctacagaggaagagggagaccttacatttattacattaacttaccccatctaccccgttgtcctttatcacctacaatccgccaaatataggtacaattatttatatgttatttaatatttagattaagattgtttatgttattacgatcatgagattatattcacagctgagtcatgtagtgttctacacttacatttctttccttgtatgcttttctgcatgatatttctccctccagtagttaattgttatttctctctctgtgaatctttagttttctgtttaactatcactatgtaactatccacaaactctttgttatatgtggaagtcacatatcactgcttaatttacttttctgttctccatagctattgttacgaagcctcgccttttcctcacactgtctcattatatggctacaatccttctgtctagagacttctaacttaacatctaaacctatgtagaaaatcaaggtgatcagccacagttataaattataacctctctgttaccaccctcaccaccttgcctctagtcctagtagacaagcttgaggcatgataatcctaccttttgtgctctagaccatatcccttcaacaggtcagtaaattacatacatcagtagtttgcagtccatttctcactcttcatttcctatgcaattaccttaatccagtcctgtcatcctatgctttacaactgcaacagtcttgtaagtggtctgcttatctcatgcttcatgccactccaattcattcttgtactgccaccaaaatactgtccttgaacacattttgggtcatgtaactcccttgtctaaatcttttggaaactccccaatgtatgtatggtaaaatgcctactccttacacaaagtcacctgtgatatggcctcttcctctctctcctaccttgtttcttttaaaactggcatcccagtttttaaaagtgagatgatatttatatatatggaaatgcacagttgtagggtgccgaggtgggaggatcacgaggtcaggagatcgagatcatcctggctaacatgatgaaaccctgtctctactaaaaatacaaaaaattagccgggccatgggctcctgtagtcccagctactcgggaggctgaggcaggagaatggcatgaacccggaaggcggagcttgcagtgagccgagatagcgccactgaactccagcctgggcgaaagagctagactccgtctcaaaaaaaaaaaaaaaaaaaggaaatgcacaattgttaagtgtcattcaatgtgttttgataaatatgtacacccatggtatacattttaaaacttaggcttgtagaataaggaactatttgcatttcctcaaatatgtatgactctttggtacttctgcacaaagtaccaatgtcttttctcctttgacctggaacatttgtgggcaatgtatccactctctctttttgcttttataactaatacataagtgtcatggcacccgtaaatctttattgtccttataaatctcatgtctatattctacaccagattgtacacctgcccgagggaggttcatttctaaaattttctatgaatattcaatagttaataccaagtgggcactcaataaatatttgtggaataaaggtacgaaatgaaagctgaatgcataattttaaaaaaatagggtagttcaggtgcatggtgtaatgtttaagggaagcagctgaagaatctgactgcctggtacaaatcagggcccaacttcatattacctgtgggatttggagaaagttatataacctaaacatgactcagctttcaaatatgtaaaatggggacattcgttgcacttatctcataggttgttaaaagttttttgaaaaattaaccttttccataatgctaggaacattttctggcaccaagtaaacattcaacgttattctgcttagtatttacatgattattaagcaataatttaaaaatttacataaattagataacgttacgttaaagatatttaaaattccagctaatcaaatggatgatcaaatattctatcttatgaaagtcatttatttttattaactaggaatctctttcacaacatctcttatcgaaggtaagaagaaaccactgaaatatcaaaatcctttgataactggaatgagaatatattagtctgtactcacactggtaataaagacatacctgagcctgggtaatttataaaggagagaagtttaatggactgacagttccacatggttgacctcacaattgtggcctcacaatcatggcagaaaacaaaggagaaaaaaaggcacatcttacatggtggcaggcaagagagagcttgtgcaggggaatgcctatttataaaaccattagatctcatgagacttattccctaccatgagaacagtatgggggaaactgcccccatgattcaattatttccacctagccccacccttgacatttggggtttattacaattcaaggtgagatttggctggggacacagccaaaacatagcagcgaataattccagattcctagaatcaaagttgttaatatatgttatgtggacgtttactttttattgttatcattattatttttatggttattttattactacctaatacataaaaattagtgtaacaaaccgaatttaaacctatatcgccagtattcaagatcacaagaagccatattagcatatgtaacaggatgatgtaagcaaaccccaccatctagagcagttcagggaagcatggacaactgatcagtttttgaaaaatgaagaaggataaaacgttggaaaataaagcaaggagagtgtgcacgattgagaacaggtgggattgatttagaatgccttccaaaaggagatgttgattatgttgattagaaaggaaattattttaatgtccaaatctggtggtagcttgttttttaaaatgattcttttagaaagcaacataatctaactgatggaaaaatagtgagttggcagcccattcaaatgaaaaaattttgttaatcaaaaaatttttttcttatttaacacatagcaaaattttgctgcaatgtatttttctgtctgttcaactaaaaataaaatcaggatgaagactgcagttagtttcttctgtgtataatttgaatccttagattctaaaatactgtagctttatttctgccatctggtggtagaaaatattgatgttcttgcagtctgtgaagctatattaattctacatacacatgtattaatatacattgcttccccaaggaataatttgtcttaactgaaattggcatgcattttagtatattgcacagggaaaaatggaatatattttctgtctctgaatttttcaatcaaaatgtatgatgacctatttattaaattatttgcacacaattatgttttattgtattaagtcctataaataagtttttttttgggggggctacagcttaaaaaataattcaacatgctctaaggcagtggtccccaacttttttggcaccagggactggtttcgtggaagacaattttttccacggattggggtggggatgaggaggatggtttcaggatgaaactgttccactgcagatcatcaggcattagttagaatttaacaaggagtgtacaacctcacatgcacagttcacagtagggttcacactcctatgagaatctgatgccaccgctgatctgacaggaggcagagttcaggcagtaattctccctagcctgccactcatctcctgctgtgcagcccagtttctaacaggccacggactggtaccagtccatggcccagggtttgggacccctgttctagatatatttttctccacattcttctactcagtgcattttcagaacaccaagacatttttaagtagctttaggataaattattaattttggttaatatctattcaagaaggggcaagtaatattgaatgcaagatgtaaaagcaaagtgtagttatcagtggagtaaaagacaaatagctggaagatcgcttttgagcatttcgtacttccttcagttctgcaaagtccagtttattgtatgccttcctaattatacaaagtaggtaatgcagcaagagtacatgaagtggcaacgtggggagtgagagactatagacattaaagtcattgtagtagaaataaacttcagagagctcaggctatatagtcaagggtctcttctccacagtttcagggtcaaacctaattgcttacctcttctaagaacctgactgcactcatgactccccttaaaatatatttctcttaggctgaagcaggagaatcgcttgaacccaggaggcggaggttgcggtgagccgagatcgtgccattgcactccagcctgggcaacaacagcaaaactccatctcaaaaaaaaaaaaaaaaaaaaatatatatatatatatacatatatatatacacacatatatatatatacatacacacatatatatatacatacacatatatatatacacacatatatatatatacatatatatatatatatatatatttcttttctttactaggttattgggaacccctactgttctgtggctaccaagaggacttttcaacgctgtggaaagctcctcctcttagaatgatattagtcctgtgtggcttatttctttgtttaaacctttgcacctgcatgtgcaagaggagtggttcagcctagacaaaaacatgttcaatattgactgaaggtttatttgctgtttcctttgaggtctctagatctttcttctttatttattttattttttggaagggtggggaagaacatggaatttggaggcgaactacctagattctaagcctagttccttctcttaactgatttcattgaataatttgaatctcagtaaatttatctgtaaaatgggaataatggtaacacacaccctacctgcatcagacattttttgatgatccataaataccctgtttcttaaagatttttaaaattagattgttaaaaaatgtaaacaatattccatgtcaacatttgttctattctacttgcttttttctgtcactggctccagccagttcaaaacaaaggaaggaataatatttaatagacaaagagaatattgtttgaaagagaaaaattttccacaaaggccaatttacgatgtagcccaagtatacgaagagctacagaatgtgctttaagaataacaggccaggcgcagtggctcacgcctgtaatcccagcactttgggaggccaaggcgggtggatcacaaggtcaggagatcgagaccatcctggcttacatggtgaaacgctgtctctactaaaaataccaaaaaaaattagccaggcctggtggcgggtgcctgtagtcccagctactcgggaggctgaggcaggagaatggcatgaacccaggagggggagcttgcagtgagcagagatcacgtaaccgcactccagcctgggcaacagagcgagactctgtctcaaaaaaataaataaataaataaaataaaaaaaataaaaaagaataacgattactccctttccaaatggcaacaccatctatagctgccaaactcaagtgaaaacatgcaattaatgatgtaccctttttacattttcatgacacctcctcttcaaaacatctctaccacagtgagaacaatttgtaggggtccagaattattagttatcaaaagcatcttgacagaaatacacactggattctatgggtcagaggccaagcaatgtgtgttggtaagaaaaggagaggagatgtttttcctacaccttcaacttcttaataaattttcccaagaccaagccctatttccgagatttttttttccaaaaaattacatgggttcactagaatatagttaaaataactctttaccagagatataaatacttaggtttgttttccttcaatactttttaaactttctctgagtttaagtttgttttttaaaaatatagttttgaatttgtactgtgtgtaattatcactgtggtaaccttagaaataaaaatatccctagcacatgcaatatatccaaaaacatttttgtagataagcttgatatgttggtgattgcacagaacattttctattctcatttaagaaatcagggtgataatttttgtcttcctaaaattattccccaccaaatatattgtgttcacaatcataaaaatggtgtttagtatggtgacaggttgtgatcacaattttctgtgtgccaaggataaattttaaaaaataccagtcttgcaagtttgccaattatcattttatattcctttctcaatatatttttgagaactaggtctctgaaatagataaaataaaaaggaaacaattacacctcaaatgatattctcaatgtagtaaaatcctcttagactttggcattagaagggcatagaaattacatatgtgattcttcattaaatatcatcagaatatctgttcattcatttattgctagagctaagccaagaattgtgcggggtactaaatatacaaaatgaagtaagtggtaagcgcaaagatgcctaagttgctacgtgcttggatgatatgtgtaaatattcaacatggaccctgccttcaagaagctcataatttcaagagaatgtaagggagatagtttactatgcagcataataagagtaatatggcagatactcaaagggaaagataaaatcagaacgaatgacaaattattctggagaataagaatgaagaagcctgcacagaatagaaaaaaagataatgcctgcatagaatagataaaaaagaaactgagactttaatgatgaagagcatatatattttattcaccaggtaaatatggtgagtggagatgaagaattggcattctgaatacatagggtaacatatataagaactatatattacataaactaatatttaaataatagattccaaaagaatagaaaagtattaacatgacattatacatctaacgacccattaggtatttttaaaattccctcattggagtaatagctacacaaagaatggagttactgtaaaccttaatctttagccattttacttatttttctgatctaatattttaagatgtcagtaaattatacatggtatatgcatatacaagaatgtgtttgaatgctaaggaaacatatgagaatttataaatcttatattccctcctcaagatgtgctaccatgttataaaattaactttgatatttttacatcaaaacatgagactgttttaatatttcaataattttgaagtgtattttttcagattttatttaggtaaatatgaagactatgatgaataaagattttgtagatgaatagagtgactaccaaatacttataaatctgattgcacacaggactagaaaagtctattttattattaaagaattatttataatagtaaaatactaaaactaccctaaatattcaatagtagtggaattactagatcaattaaggcatatccataagttggaaatactatgcagctactaaatgctgatttttaacaacaacttttgggaaaattgtcggggttaaatattaagtatgaaaactaaacaaaacagttttaaaatttatttttaaaaattacttttttggctgggtgtggtggctcatgcctgtaatctcagcacttagggaggctgaggcaggcatattactttaggtcaggagttcaagaccagcctggccaacatggtgaagctccgtctctagtaaaaatacaaaaattagccaggtgtggtggtggatacctgtaatcccaactacttgggaggctgaggcaggagaattgcttgaacccaggaggtggagattgcagtgagctgatatcatgccactgtactccagcttgggcgacagagcaagactctgtctcaaaaaaaaaaaaaaaaaaaaagaaaaagaaaaaaaattactttttttgttgttgtcgcagacaccaaatcacaaaagaagtagcctgaactagtgttttatagagttggaactcagctgacaggttggttccagggtggtgttcttagccactatccaacactgcctccctagcaagttactaaaatgttagtgatcatactctcctaatgtgcaattatagttgcttttaacttcttctttttacttcatatattggctcaactctttgtaattaacatgtattaacagttctactataatatacgtcatttttttggataaagaaaaatatgacaaaggagttagtactgaatttatcaactagactaactgaaaatttttctttctcacctatattagtcttgaaatcaacatgagtgttaattgcttctattcagataataggtgaagatagatgaaagacatcgcattcattcattcattcattcattcgtgtgatagctaaaattgtaaccactgcatttcctatagttgtctagtaaatgatataatgagattctactttcaatgtacattttgtgaagaaaacatgcccattgttcttggtagtatcctttagaagtgataccatttttctaacatactgggtttaatatctaaataagcagctacatttggaagagctaactgcaaagttaacctaggtatatattaaccaccaatcaatgattgagagtgataacactataccaacttatggaatgctagttgcaccttagagataatataatttaactttattcaaaactctcatttttacagataaataaattatagccctaagtcttctgtgaaacagttattctggctaattagtaacaaaattaagatgagattcattcatatttaacaacttgcatgtcaaattcatttcattctgtaatattgcatccaattatcctaatgttttacatatttgtttgaaaatattttaataatttatttttcagtcttctaataaagacattacaaatctaaatgcaaatgtgtttgttaaatgaaaaagaaatcctaatgaatcctgtattgctttgggtcattttgagggagtataatgtttttacagtctctattttgtactgcaatgaagagtgaatttacaaagtttatctgtgatattaacataagttatttaaggtgcttatgtgataaaatatataaaactatatacataattcttaaataggtatcagtttaaggccattaatgggagacatcaaatgaacaatgtgtttcatgggaagatttttataaaaaggaaagttggtagctattatgtaaaataggtatgtatagcttttgaaaataaataatatatttttcttctgaataatttgaagagtctatctaatgttatagtctgtctcactttttaaaactgtttctcacctgcagcatccttaaatttaaaactgtaataggtatgctggaactatttcttatactatgtttcaatacagaccaacctattatgcaaaagaatggttcactaaaagcaatctgagaaaagggggaaataataagcaattcaggaaactatcagaatcattatggcctgacttaatccacaggtaaatttttgagaatctgtaagaatactgcatatcccctgggtaatgctccatagttactgttttgttcatctgagcattgaaaaatattgaacagtggtgtattttattttttcttccttactggtacatacatgactaatttgccagctgccagttatttcagtgcagtcatgtcatagattgctggctatagaaaacaattgtgtaatgcaggattgacttctgatatggtttgggtctatgttcccacccaagtctcatgtcaaattgtaatccccgatgctggcagtggggcctggtgggaggtgattggatcataagggcagatttgcccttcggtgctgtttttgtgattgttagtgagttattgctagatctggttctctaaaagtgtgtagctccctcttctcttattcctgctctggccaggtgaaggtgtgcctgcttcccctttgccttcggccatgatcgtaaatctcctgcggcctccctagccctgctttctgtacagcctatggaacctcgagccaattaaacctcttttctttgtaaatttccccgtctcaggtatttctttatagcagtgcaagaacggactaatacaacttcttatggaaattaaatccctaacaaggctaagtttctaaataaaggtcactccatttatcctacgaggtgagccacgtagagaagtgagataaagataaagaactgacactcattgattcacaggtgctgttggaacagagttgatgggattgttcacagaaagcctgaaaaaatcccagaaaagtgctacatgaagtgtacttagaagccagaagtcatataggcaacctgaacatcagaaaaaaatagtgctttggtagtcaaggatgaaaatatttcaataataatttggaggctaagtgcagtgtcttatgcctgtaatctcaggactttgggaagctgaggcaggtggattacttgaggtcaggagttcaagactagcctggccaacatagtgaaaacccatgtctactaaaaatacaaaaattagctgggcatggtggtgggtgcctgtcgtcccagctactcaggaggctgagacagaagaatcacttggacctgggggacataggttaccgtgagtatagaccacgccactgcactccagcctgggcgacagagcaagactctgtctcaaaaaaaaataaaaaaaaattaaaaaagagaataaattggcctaaaatataaaatataaaatgtcaaagaggaaccaaatgagattaaactgaaggttagctgttatttaggcaattaggatgttactattgacattgtctttgacaaataaagacagattgacctgcacttagcactacatgagatatcagaaggtgcccagtcttaagagaaatttgactggcagatgtttgtttggtggtgatctagggtagatttaggtcataagaacagaaactatttgtagtcttaagagggaagagttttataaaggcacaaaaggcagagaagatacttgatggagcaagtcctggggaggtggaggagggtgaaatcaaggtcacaagtgagagaggtgatcttggaaaatagagagtatacctactagagagaaaacacagattctaactaccggataaggtaattgtcgtgagcataaaacaaagatttgcagatagtgctcaagattttaaacaactacttagagatcagttttaggggctgattagagtaaataactagagttctaaacagagtatgggctcattcaaaagaaaaatgtatcttagtaatcatgaggagatggaaggctttctgattctccctagcagtgcttggcaaccaaagatttggagtagaggaaggagatagatttttttagaaatgggattattaggatagttgtggtagaaagacaattagaccaaagagataattgaactgaacaatgaaggctctttggacaatctgaatgaaactacaagtattgggatgccaaactaaaggtgggttcaggaaacctttggggcttagggtgttgcttccagtttattttctatataggtttatctctaaatttttgtcaaaatttgtatcagaacttgaatgatttgactacaattacttcaactctaattatttattttctataaacacaggccaaagggaatggaaaaatatcaagcacaaaatggcatccagtagttcaaaatttttgccagtctatacatgtggttgatataaagtaatgatgcaggaagcaacctcattatataaatattcaccatgcagttgtaaagcttaatgaaattacaatgaaactatattagaaagaatagcttaaatcctaattactccccgaaatgacaagagccaaggtcactgttggttaaaaatacaaaactatatttgatgtattttgtttgttcgcagtagatttctttctactcagggaggcagagaagaagtgatgagataagatgactatttaatatattcagctcatttcaccctgaaatgtggcttaaagccagctagaaatgtattttctagctttagccattcctttatgtttaatccatgatacttataaatatatttatccaaataggtcaatattatacatatctcattgagaaaaattactagttaatttacttcttggttatctcagatttattctgaaatgtattatgttattatcatagattgcaaatagaaaaacttgtcttttgctctccttaaaaagctaacatttgctgggcacaatggcttatgcctataatcccagcactttgggaggccaggagaggaggatggcttgagcccaagattacgagaccagcctgagcaacatagtgagaccttgtctctataaaaaaagttttaaaattagccaggcatggtggtacatgcctgtagtcccagctgctctggaggctgaagttaaaggatcacttgagctcaggaagttgaggctacactgagtcatgttcatgccactgccctccagcctgggtgacagaatgtgacactgtctcaaaataagtaaataaataaatagcatttgagagtttggatttttgacctcggaagctgttgtgaggactgaagttcagtcaagagggtgaggataggctttgaactttaaatgttaatctttattaattttatcttaaatgtgtgcatgaggtgttctggatagaatacagattattgctattgacttaagaagcaaataatgattctgtaattctctttactctgattgttacccctggccaatgtgatgaaacctaattacaatgccctagaaaggcaaacttctaataagagaaaaaaggagaaaaattgattttctctgcttatgtactggagaaagacatagctgcctcctcctaccctcccaaaataaagaagaaaaatctttccttctcagacaaggatgaaaaagaacccatgttctcactgtaatattttggaatgtaaatacatctctccaaggccactggattctgtgacagaaagatgtgtacatagttttagacctttttttcccttgaaatataaattcatacatatagaattaggtcaatctctggagttcttttactatctgtacagttgtaaataaacttcccaagtcttgctctcatttgaagatcccaactttcagaaaaatttatttagatggccccacccccagaaacacaaaagcatttcctctttctccataatagatgatctagggcaattttggaaagaggtgataggaaaattggagaataagttacaggcaatatgcagatgcccatgaccacttagccaggatgtcagctagagtgactacctgacatgtgacatgtttaaacatgacgccagggcagtccagggacagattctaggcaaaagtcctcacgtgaaagaggtcagcatcaggtataaaagcttataagataaactttgattcaggatgcagaaagattttttgaaaatgtgtaaattgcaagggagtagaaaacaaagtagagaaataggataatgttctgtgttgagcaggtatgtacaaacctgtccccaaaggtggagggagctgagaagccaaagaaagaggctgagaaatccagtttctcagaaagaaatatttaatagggacttaggaacagagcaatatccaggccagccatgagatagtggatccctgcacccactctccattaagtgccctttacgtagcaagcttttatggtaaagacatgtgcagctgggcaaggggggcagttggataagcatccttatgtggggttatctatgctccaggcattgtttagagaccttgctgcagaacagcatatcatgcaggagtaaaatatcggttatcatggcagtttcgctttaagatggcgtcactcttgccatgcagcaggccgttttcctatagataagaacttggttctttatattatgaaattcctaaattatatacctagatgggtcattttaaaattcattctttcacacttgtatgccctttccttttgaagactcatgtctcttcccttcagtcctggaaatttttcctttattatttttttgataatttctttccttctctgttttctattctcattttaaaaaatttctattaattaggtcccagatttattggattaatattctgccttctcttatattttctgcattttttcttgacttttgttctatattctgtaagatttcctcggctattgttcccttctttctaatattattaacttatgcaaatatatatttaagttctaaaacctcattattattctatttgtcatagctttatgttttgttctgtgaatggaatatcttcatacatatctgagggtaatattcactttttattattttttaaattatctgttttccctaaggttattttttcctataaagaaaaaaaaaaggagctcagagctgtgcaaagaatgtaaagtatgcacaacttaccaaactcagagagaaatgagaataagccttcataaggctgggggacacccacccacacatgcctcattgtggggaagtgtttaaaggcaaattgttctttctttccttccctgtagtttccacactcactgataagttacctaaaatgctatcacaagttgcacaatgtgaccctcacccattatcttcatgctcctggaatttgcaatgcaaagaacaatgtatacttaatcaatagcttatgttcaacttagaagctgccccttcatttttcctttaaaagcacacttgtaacgttgctaatcaaagcatataatcaaggcaatttgaatctgtctctcaagttgaaggactcaaatttggcccaaagaaaccctctacttataataatgttgcctcagtttctttctttaggttgatacctgtttggctatgcttttacaataaagcttttttcaaatgtcacatgatccattattatctgtccatatttaacaataaaaagtgtgactaggggcagtgaaaagcagttgggacttcctaacagacaacttcttcagtttggagtgaatgttacagagccagcagttctgatggtgcatcccaaatgccaaaaggaaggagtttctgctctgtggtgctttcacacaatttttcctggttctcctaagacacttttataaaaagaaagattcctgactatttttgttaaacttaacgtgtgactgtaggtcaagtattgaggtattggaggaaaggatcttccttatagacttccagttagttcaacttttcgatgcaccaaccctcactccagcctttcttcaatttacactccgctccctgagttcttagtttttctggaattcccctttgctttatggtttctccagttgtagcacccatttagaatactttaggtgaagtttgctccaccctttatcagctgacacccttccctctgctttctgtattcgcatctttgttgtaaatttgcacctgctaaggtgccctttcctgctgtttgtattgctgtgattgtaaccattttcattaattttcatcaatttttatgttgtcaaacattctgaatagaaacacatgtacttggtcacaggctaggcactaagctcaaggtctaacctctatagctaaacaaaaatattctgtgaggtgctttgtgaaaaaattcagagggagaaagcagaaataaggaagccagatccatgtcatctaagccttaaaccaaatttcattcagcctgaaaaacaaacaaaaacaaaatacaccccaacatgtagaggatgaggtgaagttgaatataaaatctttaatattccataaacaatgtgatatatgtgactgtttaaaactaaatacaaatgaggcagccaacaaatatctctactctaggaatattccagctatgagattcttatagatcaatcctgttccctagaaagcagctactttggttttcacagctgagttttggtgattatctcacttacatgctttcctagtagaccaaccattccttgtaaacatttacatgctacagatgttatctctaataattccatcaaatcaaatggaacgaagcacagtaataaaaatcaggattgttctatattttagaggatctatttcttcctagcatctgtgggaaatccttggattaggataatgctttcattatagtctcagaaaaagtgaattattaccgatttgaatggacagtagagagtacatttaggcaccttgggtgtcaacaattaatggttcgattctctgcatggtaaatcaatatgtacttgggatatataattggtacacaaaataaaatatgtggcttagatatactttataattaaattttacactttttgaaatgctataattaacacagacaagattattttctaattgtgtgtattaagtaaaataaagtattttgcaaaatgaataatactttgaactatatataagtattattctaaaaaaatcaaacaactatataattttaaaatcatagtactaaagcaattataataaaatgtttaatgaagtttaaaataacaaatacttacgtagttttacatttcataatgcttaaaagtatataataaaaaatagtgttgctttgttccccatcttccaatataattcctttgcgcaattaacaattaacaagctaatacagatgcacattaagatttttattctaaaacacatataggcatattctttttaaatgaagtagatagaatccacataccacaaaactaaccgatttaaagtgtacaatttgggatttttagtctattcataagtctatcacagagttcaacaatcaccattatctaatttcagaacattttcatcacctaccccacccactaaaaaactcacatactcattaagcagtcatctctttctaccctacctgtctctacgaatttgccctttctggacatttcatatacaaatggaataacacatatgtggccttttgcatctggcttctttaacttaccaaaatgttttcaaggttcatccatgttttagcacatatcaatagttcgttccttttcatagctcaataatattccattgtatgcatataacatattttatttatccattcatcagttcatataatttgtttgggttgttttgttgtgattttgatttgtgtttccataatgactaataatgttgagaaaaattttcatatacctgtaggtcatttgcataccttctttggagaactgtctactctgtttctttgcccattaaaataaaattaattatttgtcttcttgagttgtgaacactctttatatattctggatgctagacccttatcagatataggatatataaatatttcacccatcttatgggttgtcttttatcttttttttaaaaaaaatattaccttaaattctgggatacatgtacagaatgtgcaggtttgttacataggtatacatatgccatggtagtttgctgcacctatcaacccatcatctaggttttaagccccacatgcattaggtatttgcccaaatgctctccctcctccttgcccccaacaccccccatgacaggccctcatgtgtgatgatcccctccttgtgtccatgtgtctcattgtttaactcccacttatgagtgagaacataaggtgtttggttttctgtttctgtgctggttttctgagaataatggtttccagcttcatccatgtcctgcaaaggccgtgatctcattctttttaatggctgcatagtattccacagtattccacattttctttatccagtctatcattgatgggcacttgggttggttccaagtctttgctattgtaaaatagtgctgcaataaacatatgtgtgcatgtgtctttagagtagaatgattcataatcctttgggtatatacccagtaataggattgcagggtcaaatggtatttctggttctagatccttgaggaattgccacactgtcttccacaatggttgaactaatttacactcctaccaacagtgtaaaagcgttcctatttttccacatcctctccagcatccgttgtttcctgacttcttaatgatcactattctaactggcgtgagatggcatctcattgtggttttcatttgcatttctctgatgatcagtgatgatgagcattttttcatatgtttgttggcggcataaatcttctcttttgagaagtgtctgttcatatccttcacccacttttggatggggttggttttttcttgtaaatttgtttaagttcctttagattctggatattagacgtttgtcagatggatagattgcaaaaattttttcccattctgtaggttgcctgttcactctgacgatagtttcttttgctgtgcagaagctctttaattagatcacatttgtcaattttggcttttgttgcaattgcttttggtgttttagtcatgaagtctttgcccatgcctatgtcctgaatggtattgcctaggttttcttctaggactttttggttttgggttttacatttaaacatttaacccatattaagttaatttttgtataacatgtcaggaaggggcccagtttctgttttctgcatatggctagccagttcttttatctttcttgatagtgttctttgatgcacgaaattttttgattttgatgaagcgtaatttatttatttttttattttattgcatgtgttaggtgccatatttgagaaactattgtttaattcaagctaataaacatttacacttatttttgctaagagtttaatagttttagctcttacattaaagcatttgatccattttgagttaatttttatacatggtatgagacagggctacaactttatacttttgctcatgcataactagtcctcctagcaccatttgcttaaaagactattttcctccatttaattttcttggccccattgtcaaaaattaattaattatgtataaaattgaaggcactgatgtagtatcttagattctagtaaaaaacttcagaaagcccatatcacttttattctctatcttttatatttggttatttttccctttctagaaacttttagaaatgtctatgaattccaaatattttgatattttactatcaattcattgatgtaggaaattttcaaattctctgtgctagacctttattctgacattgaaactgcagcagttttgaaacatgtctacaaatctttgacactcctccactcaacaggtggggtctctgttccaaccgcttaaatctaagctgaatataacaacttctttataactaagaggattaattggtgagaatattatgtgaccttccaagcctaggtcattaaatataatgaagcttccatgttgcatggctgggacactcacactggctgcttgagctaccgtgtaagaaatttgcctaccttgtaatctccattttgtgtggaaggccaggtcacatgaagagttcagacacagtccacatggctttagctaaggtcatagatgaaagtcagcattggccaggcacagtggctcacatctgtaatcccagcactttagtaggctgaggcagacagatcacttgagcccaggagctcgagaccagactgggcaacatggcacaacccagtctgtacaaaaaaattagccaggcatagtggtgcacacctttcgtggaaggctgaagtgggaggatcacttgagcctgggaagtaaggttgcagtgagccgtgatcacaccactgcactccagcctgggtgatacagtaagaccctgtctcaaaaaacaaaacaaaaaaatctcagcatcaatttccaggtagatgagtgaggatgactctagatgatttcagtaccctatcactgagtaatctatagccattgagtgtttccagctgagggtcctgaaactgtgtagcagaaacaaaccattcttcctgggccctgtccaaattctcaactcatttaaccatgagcatgataaaatgagtgtttaaagagctagattttggagtatcttgttacttggcaatagtgaccacagcaccagtctttcaattttggacaataataacttccttcccctggtctgtttttctgaaactccttttagttggatgttggtccacctagaatgttcctctaatggtcttaccttttgttctcccgtgacgtgttaccttgtctttttgtagtgtttttttgtgtctgtatgtatctgtgtgtgtgtgtgtgtgtgtaggagaaagattttccttaattttttcaaattattttgttgaattttaaaatttttatcatagtattaatttacaataatttttattcttgtggtctgctactttttattatatcttactttttttgacatgcatacaatatcataagctccttccctgaagatattaattttggagttttgtgttatattttctctggctcctctagttacttttcttctgttgcttactttactttagttttttctatcttgaagccattccttaaatgcctggtgatcctcggctatctgttcacatttgagtaaatttgtagctacatgtgcatgataagtatttgctgacttccaggcttcacattaaataatgtttttatttgtgtactaccgaatcccaatgttttaaagttacattttgtgaggccatttcattttcctagggaagaatctatgatctcctgcctgtggaagcaattcaggtaatatccacttggctgtagttcatactagcactagaatgggggcaggcccttagagtttcaacattcatttaattccccagtcttagtctcttgcctcctgctactctgctgcttctcctgtactagtctgggaccagtctgattcacttattccaaacaatgaaaccttaggctctttaggggtcaggaggaatgtaatgattcagggagcagatctggaggctgactacaattaatgtagaccttcaataatcctccaagtatctgctctatatttgaagttgccttcttcaagactttgaactgccaggctttcttaagaaattatgctttttttttttcatcagaatagtactctgattataattttctttgctcctaaaggtcaggcatcactcatctgtatgttttcagtcttctaaaaacatgttgtaatgttttatccgctcttatctctttttctttctgctttgtgattatagttttatactttcttttaaaactcttttctgttattttagtggagtttgggaaaaatagttttagccatgttgaactaacattttgcaattaatttaaaaaactgcaaataaatcatcagtttttatgacggaatatctttgtttcacttatttattttttcaaatttatttgtttaaattgactgaaaaaattgtgtgtatttcttctatacagcatgatgtttgaagtatgtacacattgttacatctgtctaattaacatggttgaatctgtctaattaacatatgcattaccccatatagttattatttgtgtggtgacagcacttattcacaatcttaatatttttaagaatatgatatattatcattagctatagtcaccctgccctataatagatcccttgacatttttcctcctatctaactgtaactttgtatcctttgattaacatcttccaacaccccggccacccctcaactgacctagcctctggtaaccaccattcttttgtatatttctatgagatcaactttcttagctgctacctgcatgagatcatgaggtatttgtcttgctgtgtctggcttctttcacttaacacagtgccttctaggattatctatgttgttgtatatgacaggatttccataaaatggctgaacatcagtttttaggatatgacacatgcaacatagtcgaataatatgattgtttacattagtataagtaatgatatcacaatatttaatataactgaacttctatgacatctaaaattacactatatatgggaacttttttgcattatattatttggaaaagtatgtatacacacacacacacagacatacactttatatatgtaaacatataccacattgtatgtttcaagttacatatgtatttatatttcagaatatgtggaagtagtttttttgtttattttttcctttttcctagagaggttggagtctgggacttggtaaagaaggaattgggcaattctttcactcacaagcttggttttgactgataaattaattacaatactttccatctaccgtacacttggggaatctacttaaatctactctcagagctgacctcccaagagaatacaagtcaattatggttcaagcttttcttgtctcattagctacttgaataataatacatttgaatgacggcccaggagactagcattaggaagtgcttgtctcagtcccagatgagcttcttggataatcctaagtgtctattattagttcaagctgtgccataagactgactcagtagtgttccactcacttcctgaaaaactggtggggtatagctttatctgtttttaatatataaagatccaattgtactagacttctgtagttgggggaattatttttaagtcatcaaaactgcttcaaaaaaagaaccaagcagtatgtcagttttgcttattttccacttgtaaaatagaaaagtacagtgttactaaaaggattgagtgttaaaggttttttaaaatgactatgttctatgtagccaaaaggcacacctagcacaaaattattttattattctcatggtcagccatgttttgatgcatgtagtggaaataagctgtggacctgtctataaaattgcacaaataattattacttgggtcattatttaagtaagttgtttaacagaaattattattttataaattattcccaaacatttggaaaaggagagctaagtacaacaaatacagtatgattgaagtcagaatttgtaaaagaaaagcaaaccatatagtaataatataaaccactctcagaaggaatatgattgttcccttacaaggtatatttttaagtatctgtatgtgtaaaactagaaataaaatcaattggtctttgaattaatctttataacactttagagaaggtgatttcaaagaacaaaacccagcaacgttttccagtgcctaaggggaaggtgtttcctatttgattagtgcttccttttgataatgtatttagctgatctggagccatcattttacagtgcatctttcatcatataaagtgcagagcctcactatttgggacattaacccttcttctcagaaaccccagggtttagagataacgtgaatataattttcctctaattctatctaagttctatattatcattaaatctctccattgtatgttaacataaaatctcttacatagacattattactggaaagttctggatttcctataaagagatttctgcttacatttttctagagaattcatgaattttatatatgttcatgcgcatgttcatacatagtatgtgcaactgactacatattggattttatgagttgatagattgtttcatgcatgtgaaatgactagattataggtgagtcaactttcatattggcttctttgttgatacatgaggattaccacataagtggatatctgtggtgactaacattgatcaacaaaagaattatgaaatttagcatgccttttgcaaatttagtcaccaactggaaacttcatttcaattaacatgttgcatttaagcataaagaccccaactaaaatggagatgagattgttttagaaggggttagttagcatcatccttctataatgagatatatttaattcattttggtggatagtatttgtaaacaaatgtggcctggggttgaaaaactttctatataaagttttaaatattaaatagatccttaatgttaaacattacaacataacaggtagccccctccttctgtctgtttcttcttatagcttgaaaacgagttatcttagtctatgcaggagaatgttttctcatgctaatataaggatctcactgatctcattaaagaaaagagcatgctgaatgtattattattcctgtacttctgctcagttgagtactctgaaagcatgctgcctattcatcaaaagacactgacaattctaatttggattgtcagtgactatggactgaattgtgtcaccacaaaactcatatgtctaagccttaccccacaatgtgtctatatctggacacaacatctttagggagtaattaagtttaaatgaggtcaagggtcgggccctaatctgataggactgatcccttataaggagagattctctctctctctctctctctctctctgtctctcgctttctctctctctctctctcaatgtgtgtgtccctgtctctctttctgccatgttggacacagccataagctggccatctgcaagccaggaagagggccctgactagaaaaagaaccctgctgaaccttgatttggacttcccagcttctggaaaagtgataaaattattctttgttgagctgccccacgtatgatatttcgtatagcagcctgagctggctagtacaacggttcaaaattagggtactttcatagaaggtctgttgtcacattgaacaagatgccttacttatttaaaaactaactgattaattataaattataatgaattagacaactgctacagagaaaaacaacacttttccttataattataggataaaaaaaatcttttataatgtcactcctgtatttaacaaaagttctaaaatactatggttattatatgtatgtctgtaagaatcttgaaatatttgtaacagtagttacaaatccttaagttcaataattgtatagtaataacaaagatacatcatatttattgagaacttactatgttctaagagacataattacatgatatgttttaaactcaacactatgaagtagatactgtatttttcccatttcacagatgatgaaattgaccacagatatgggaacacaaggatttcatcaaatagtcttaatgtctcaataaaccacagcgcccagtgctgcaccttggccatggagatacgtctgcaacatgcatcatagcctggtatccatgggacaaggctgccctagataactctggagataagttgccagtgtttccactgttgtctccctttttgctgatggtgtttagaccattttttttttctcatgaacacattttttactttagacagagaaaaaaaattacctacataagagcttcctcatttaccatcactttacagttttgcatcttcaagcttatactcaggattagtttgaatgaatatgaggtattaccaaacacttacgacatctcttaaaaagggctaaacttattccttacatattgagcctttctaatttcttctctgagtgtaatcataattttcaatttttgaaatgtattatttatattcctacttatggagaaaaagtaaaagagaggatggagagctctctttggagcccagtacatttccagagcaaatcaactctctccacttctcttagattctatcttttgtagattcttttagattatatctttttattgggtccaggcccaataaaagtttctcaaaatttttgagagccaccaaataagtgaaccaatgatccttttcaggataatgtcctatctctcccgcttctcctagaccattaaaatgaaagggagaggagggggtcagatatacacccggagaattctcccatggacctgtggaaaagggaggagagtgaaattgctaatagataatcagtaagcagcaaatgcatgtactttcctgtgcttcctgctgtgaatgtctgttgggaggatcagtaccgcctggtccctcatcatctagatatgagtttcctagccaaagcagattgttatcacattttccccaaagccagtgtttattatgtcacagaagaggcatcaaacaaacaccaacaaacacaagctcatcatgtaatgaaatgaatatattttaaaatattgctatttgatatcacatattcaatatatttaaaatattgctgtttgataccatgccaaatattaccaaaatgtgcattgagggaataattttctctctaagaaataacctcttgttcttaagcgttagttagggacttgtgtggttaagcattccttgaaaggataggaaatctatctagattgtcaaacaagttgctacagagacagctgaatcagagaaggcttcccatgactgatttgtggtgtggattttgtccatatgcttcacatatggccataattattgtgaacatcataaaacaatttatgaaatacactacaataggcaaaaatatgaaaaattgatacaaattaataaatggaaagcagttaagaaaggattaaaatgagaaaaaaataaaatagttcaaaataaattagtgtattttaaaagaagtgcctttttttaaaaaaagtgaaagaattagaaaacagaaaaataaaaatttaggagtaaaaaatagtgataaaattacatacaaaataaaagataaaatgctacaagtaaaaagtttataacatgtaaaaacctgcataaaatacatctcatacattctgcaatcataaaagcacatagattgtacaatgagaataagaattaaggattgaaaatattgagtacagattataatacaaaactatggaaataaatgagaccaagaaaaacaaacacaaaaacaaaagtaataattattagacaactagttagtaaaattaaaaagtcatagggccgggcgcggtggctcacgcctgtaatcccagcactttgggctaccgaggtgggcagatcatttgaggtcaggagttcaagaccagccttgccaacatggtgaaaccccatctctactaaaaatacaaaaaaattagccagacatggtaacatgcgcctgtagtcccagctacttgggaggctgaggcaggagaatggtttgaacccaggaggcagaggttgcagtgagccaagatcgccaagatcatgccaagatcatgtgccaagatgcactcatcctgggtgacagagctagactctgtctcaaaaaaaaaaaaaaaaaaaaaactataaaaattaagatgtcataaatcaagataatttttaaaacttttagaaaacatatcaagatataaatttgggtgtaaatttggatataaatttggatattggatacatttggatactgagatatgtggatcagcaaagtcaatggcatgaccttagtatggtgatcaaaataattctttatagtagaaattactaattccataaaagaagaaactagtttacacctatctgaatacacttatctgtctatattttaaaggttaacatttggaactacttagaaaaaaaatctttataaactcttgcagtggagtggaaagaaaaacattatttccattttagtataaagtgaagtataaacgcatgattatgcacgtcaagataaactatctcagtttggatttttttttatgattctgttttagaaaccaagaatagtcttcaagaactaaaataatgaactctgtgagtcaaacaaatgaacatttttattatgatatgaccttttagtctgtttggtcctgatactggtgtgatgtccttttctggataaagaataaataggtcagctcagtaatttctgaataccaaatttagccttccttttgtttttagttcagcagaggaaaatgatatggcaaacagccttgagaaggtaggaggatgagtctgtgtgtgctattaatacctacattattttgtccatacaagagtcaaacctaaagagacagcagaaggaacagtaggttgagtcataggtgaagaggttctggggtacagctggggacacagaatgaaccgatgtctgaaggatgagatgtgcggatccgggaactggtaatcaggaaacttcaatgttgttctatagaagatgaagagttgtagatgaaaatgcctattttgcgcttcagttgtcccctcaaggacttgtcccctagggagacatcaggaggggacagactggctttggctttatcctgcttttcggtagccaaggtctgtttatagcactctcctctcccctgccttggtgctgcatgtctttttactgtccacagcctcctgatgcaccaagaacccacacacacaaccaccttctccgctcccttcaaagcaccatgtgctaaatctttgatctctgctcagattcccagtcttaaactgaatctgatgtcagctggattgaaaagaaaagcaattaaattatactaattcatatgagaagtgtgaataactgataaccccacccacttccaatcactttgagaaaaatttgcattgtaaaataagacatgttaatcctaataaatattcaattaatagttcagtcaatatgagaaagtaagataaagattaaaaaaagtcagggattgtgaaaaaatttttgggcagaaggaacatatttaatgacttctaagtgtttatatactttatttccaaattctgttcttgaatcctgggatatactttttagtgcctggtcagatatagtctgtgatttttccacctttctgtgtattaattagtgtaatgttttaggtaccagatccatcttggttacttccttgatgaaagttttagtgctttttgacaacacaaattatgagtataatccttgtcctgctccaatttctttttaagtcataagaattgaattcttgctcactagagcaattggttgttttttactttttggtagaacaagttctattttgttaaatgcacagctataaacaagggttaaacgacctctttagatgaaacaaaaacaaagccatcaacagaactatcccccttgtaagaaagatatatgcttgtataacttctattgactgaaggttataatatgcatatatttgatacacatatttatctctaatctttgaacatcccccactaaattatgaagaaactctagtacacagcagaggtgagatgtttcatgctgatacctcttgttctccaagttaatcttttcctagaaataaagacactgtctagagtgtcaaatccaaagaaatgaacacaaaattggaaagttactatatgtgaatttaaagtgcaatgagaaagatgccctggagagaaaaggtgacactgggcaaacaggtatagaagcagcctgaagagaattctggaagcaaaagctctaggttgcaagtgaatgatgcccagtttctactttacaagcctacctgtttcctgcttttgtaagtgcatcaaagaaagtaaagtatattacccatgactgggcctgaattttaactgtttttcttacttgaatgtgactttagacaagtatttttaactctctgtgctttaattttctaatatgtaaaaataggtttaaatatgtttactctgattaatttacatagtctttggaagaatcaaataagatgatagatataaaagttatttatatgattaacttatttaagtccaagattgacattccttcatagaatttctctgaagaaacattcatagcattactatttatattgttaaatttttacacccactaatgtgtttatatctataagaactgccagaactgccaagtccagtgaataatgatataagtaagaatatttttgttgttgttgttttatcaataattcttttttttttcttttttggagacagggtctccctctgtcaaccaggctggagtgcagtggcacaatcttggctcactgcaacctccaccttctgggttcaagcgattctcctgcctcagccttccaagtagctgggactactggtgcccgccaccatgcctggctaattttttgtactttagtggagacgaggtttcaccatgttgcccagggtggtctcgaactcctgagctcaggcaatctgccagcctcggcctcccaaagtgctgggattacaggcgtgggccactgtgcgcctggcccatcaatatttcaataaatgacctgttttactgagtctatatggtgagctagtgtgcggatattcaattaatgattcactgcttttgtactaaacagacagtattttgcaaatatagtttataaaaatagcttgcagtaaagtatatgttattgttatggactgaatgtttgttcccccaactccaatttatatgttgaagtcttaacctccaaaacagttgtatgtggagtgtggagatgtggtctttggtaggtaattagatttagataaactcatgagggtagggccctcatgaccgatgagcctttacaagaagagacatcagagagcttgctgtctttctttctctctatatatacattcacaaggaagtcgcgtgagcacgcagtaagatagaagctgcctacaaatcaagagaagaggccttagaatgaagcccaccttgttggcaccttgatttttgactttacaggctccaaaactgtgagaaatacatttccgttatctatgatatttgactacagcaacctgagctaagacacttatacaaccctattttgttaaatatcctaatgtgtgtatactaagaaaacaaaaggaggaatagacaccaatcttctaacaatggttagcactagaatttaagaatttagggctcttcacattttacactataaatttgtgtattatagtaatatttttaatatgcatgtaatacccttctgatttaaaaaagaaaaaaatacatttatttaagaaataagaataaaatcttagaaagaacacttaagtttagagtcaaatgactgatatttttcttgattgttttgcttaaaaactatatagggaagatactcaagttgcataaacctcaatcccttcatctgtatgttatatataacaatatttgccatagccaaggtctgcaaattttgtggggaaattttgtgagagataaaacataagaaaaattttaaaaactatgaaagtacttttcgtaacttattgtaaataagttagtcattaaatttctaaaggaaacatatttctgaataagagaaaaaaacttctagacatgagaattttaagaactagctagcaatacacaaagatgcttttaaaaatgttattcatccatatgaaaaggagtggaaattgaaactgttaacatttttaaccacgtctggaaacaaagagaactagcctattattctgagatgtcacatatttccaatgataaggttcttatctttttttatttgagaaaaaaagcattattctgatattctctctctgctaagcttatctttttttcttctttccaatttctctgcatttctgtctttgaatgtgtatttcagaaaattgagagagttaacatccttagctctgaccagactagactaattcaaggtctgtgtttcctcattctttcaatagttcagtaagacttattgaccaagaacaatactcggagttttcctatgaaaaataatatgtgctattaaaaacaaacaaatgactcatttctgtctgctgtgttgattgatggtcaattaactttagcagtgcctgcagtgagatatcaaaaacaagctaagtttgactttgagtggcttcactatgtatttgacagatctttcactttgaaaaaagtagtcccattttcctgtcacttgccttcattgcattgtgggagtaaaaaccttggtgaaaccgaggtcatatatagtattaaatttaaaaaatatctgacattgctatcttagaggacaagttttctatggaataactggcaaccacagctaaaaataggtctgttcttggtgtcatcttttactcaacaaataaatacatcaccttgttagaagatatatggatactccgtcatacgtacatgatcacaaacacctaacacttcatattttccatttgcggattaggatagaaaaatttccaataaagaaaattttaatgttacaggctttgagttgtcactgccatttgtttatttgtttgtttcttgtctgagatggagtctcgctctgtcacccaggctggagtgcagtggtgtgatcttggctcactgcaacctctgcctccaaggttcaagtgattctcatgcctcagcctcccaaaaaactgggattacaggtgcacaccaccacacccagttaatttttgtatttttagtagaaacggtgtttcaccatgttggccaggctcatctcaaactcctgacctcaagtgatccccccgactcagcctgccaaagtgctgggattacgggtgtgagccactgcacctggcctgcagatttaaaaaaaagtatgcactgtttcacattaaagtataaagtcgatctgatattctatgaaatttctttagtctatgcttcttttagaaaaaagcaaataagggcagaattctctctctaggttctctacattccagattaactgagagttccagattaattagataagaagtatatatataaaacacaggttccatataaaatttaaagtagtttttttctgattctgtgaagaaagtcaagggtagcttgttggggataacattgaatctataaattacacaatagcaaagacttggagccaacctaaatgcccatcaatgatagactggatgaagaaaatgtggcacatatacaccatggaatactatgcagccataaaaaagatgagttcaggtcctttgcagggacatggatgaagctggaagccatcattctcagcaaactatcacagggacagaaaaccaaacactgcatgttctcactcataagcgggagttgaacaatgagaacacatggacccggggaagggaacatcacacaccagggcctgttgaggggtggggcctaggggagggatagcattaggagaaatacttaatgtagatgacaggttgatgggtgcaacaaaccaccatggcacttgtatacctatgtaacaaagctgcacgttctgcatatgtatcccagaactttaagtataatttaaaaaatagaatgtttctactacaatacaaatttcctgagtgtgatgtattatttaaccttttcagtaaaatgcaacatcatatgggacttctgtaaaacaagtatctgtgcctagaatagtttttggaaaaaaaaaaaaacaggaagatgtgaaagtctaaactgataatgtagaaatgaaaatggagttaaactagactagttattctttcaaaatgagaatgctttattttaagaaaaaacaattttctaaaaggttatttgactgcttagtggatttatttgttgaattttattttgatattagtgttgagatataattcacataccatgtaattcacccatttaaagtgcaccatatcaggccaagcctggtggctcatgcctgtaatcccaacacttagggaggatgaggtaggagaatcatctgaggccaggagttcaagaccagcctgggcaacatagtgagaccctacaaaaaatttaaaaataagtcaggtgtggtgttgtgtacctatattcccagatactcagaaagctgaggtgggaggatagcttgagccctggaggttgacgctgctgtgagccaagttcatgccactgcactccagcctgggcgacagagtgagaccctgtctcaaaaaaaaaaaaaaaaaaatttaaaaggtgtacaattcagtattttttcatatattcatgctttcacaaccatcatcacaatctaattttagaacattttctttcctgctaaaagaaaccctgcatggattagcagtcaatcagcattatcacacactcccattgtccagcaggatccattgttaatctgcattctgtctctatagatttgcctattgtggatattttatgtatatgaatcacacaatatgtggccttttgtcactggcttctttatttaccgtaatgtttttcaaggttcatacattgaaaataaaagtcattccatgtaccaatatgccatttcttttcattgttaaataatacttcattgtatggatatgccacattttactgatccattcatcagttgatagacatttgcattgcttctactttttggctcttgggaataatgctgttgtaaacagctgcctatatccacaataggcaaatctatggagatagaatgcagatttacaattgatcctgctggaagatgggagtgggtaataatgctgattgactgctgatcagtgcagggtttctttaagcaagaaagaaaatgttttaatattagattgtgatgctgctgtaaacatttatgcacaagcttttgtgttttctattctcttgagtacgtaaataggagtggaattgctgcatcatatagtaactctatgtttaattcccagtaagaatgtagtgaccttactgttatgggttcaagacacaaattgactcttggaatcaagtggagagtcctttctataccaagctcacatgatggttaattttatgtgtcaacctggctaggctatgggcaaacagcctaaatgtttctatattgtacttgttagatgtgattagcattttaatcagttgactttgagtaaagcagattgcccttcatactatgaatgggtctcatgtaatcagttgagggctttaagagcaaagaccgaggttgcccagatagaaggaattctgcgtgagtttccaggctttgcactcaagactgcaacactgactctcagacttttcagcctaccagcctcctcgctgattttcgacttgccaggccccacactcatataaaccaatttcttaaaataaatatctctggatatatatccatcctcctgacctgtttctctgaagagtcctgtctaatataccacatgatttaagattgagggagatgtggtttcacacaagacatcaaggttctggtaaaaaggacaagaggtacaaaatacatgttggatgataaaatcaaagtggatactactaaaaatcttctaatgttttaatctaatatccaacttgctctgaaaagttcgcttgcaatgtcactttcgatattaatacacacaataataacacaagtattttatttttttgagatagggtctcactctgtcacccaggctggagtgcagtggtgtgattttggctcactgcaacctccgcctccagtgttcaagtgattttcctgcctcagcctccctagtagctggaattacaggcacctgccaccacacccagctaatttttgtatttttagtagagacggactttcaccatgttggtcaggttggtctcgaactcctgacctcaggtgatctgcccacctcagcctcccaaagtgctggattacaggtgtgagtccccatgcccggccaacacaagtatcttttaaaagttggaggagagctatgatgaatatattatgttttctttctctgctctattaagatattattagcatctattacttattttccatcttggacatttttgaagaaacacagtcattggacagcatagaaccaatgtgttttaatgtataaaatgattatggtgtatgtcagatctacgagtttgggtataagcacttcgtagatgttgtccagagtgggaagtctggggtgcaagtaaaaataggcatacagagagaagtagctacaaggagcagtcaaatacttctctaataccaatctcacaaaggtttccatttattttatagttgtacagattcccaatgaatcccagtatgtgaatttattagacattgcaataattattatctaaaaataactaggagctcgtctactaagtatcaatatacatatgtacacataaacatatacacacatttggtctgagtcttatgggatctggcaagtgctaggtggacatgttcagaagtgtttctagaagataccaagaaatacggaaatataggaataataaagcatagtatataaacctatgcaaattacagtaaattttattaaattccccttatgggcaacactttgggtttggcacttaggttaaaaaggtacatgagactgatgacatctcccacagatgtaaaattcttgttggaacagacaacagaagcattgtttcaatcagtctgctttactttgcaagtagccacacatccaaatcactttgagttaaataaaaaataaatatatcacaatgtcacatcctaaggtagggaggataaagataacttaattggcaagtcctgcctctgcttcccttgactctcttcactttgcttgttcttatgtgcagtggtgtggacctcatatccaaggtttaggatttttagaagaaggagaacccgataattctaagttttagccttccatgtcagagtcttggatagtacctgtcattgaaactaaaaacagtctctgaaaccacaaggttgctatacaataaaaagggagaatgaattactatggaaaaagcatcaattttcttaataaatataaaaacacaaatcatgtgtgccaaatttaagaaaggaaacataattattactacaataactctgagaaaataatgaacagatttagaattaatgggaagtcttaatggaagatgtatgtgaaactgttacagtaaaggtaagagttagaaaagagagaatttcagatatatatatgtatatatgtatatatacgtatatatgtatatatgtatatatgtatatgtgtatatatatgtatatatgtatatgtgtatatatatgtatatatgtgtgtatatatatgtacatatgtatatatatgtgtgtgtgtatatatatatcctgagcaaagacacagagacagccttgcacaggtgtgtttaagagacagtgaataaaccggattgtctgaacaccatgtgtggagcatttgacagaacccagattacaaaaggtcttatgtacttgtttgaggaattagtattaatcttttgacagcaaattatacgattgtacagaaaaatcaactgatgccatctgaagcctaaattctagtttgctactaactttgcaacctctggtaaaccatgtaaattgcctaggtttaaattttctcattaataaactgagtaggttggaatatgtgattcctaacttactttccaaactttatttccttttgactctataaaactctgaaatgacatcaatatgaaagttttcagcaaagaaggaatacagaaagcactggattagaaaggcaggacttacgaaagtgtttgaaccactttgaatgtaaaggatgtagcttcagggggttcaggtaggagacaattattgtttggtatcatgagataagaaccctaactagaactgaagctctgggaatagaaacaaaagaatagttgattttgaaaagaaaaagtttctggagacttaagacttttgacagacttgatgatagggaataggaaggtgaaataaatcaagatcaatctaggaacatgagcctgagtaaggtataaaacataaaaaatatggaaactaagcaggagacggtttggggaaaagatatcattgagctctcgaaataaagacagccatcgggctttagaacacatactgaaatgtggctgataatggtggacatgagactcattcacagagggggcaatgagtgataagacaaaaataaagataagatcagaaacagtacagaacaaaatggaaagaggcaaaatgataattcaaggctatgtccatatttaagcagtcaatatgaaggggaaatttaagaagggaggaaaagagagctgtgttctgaaactgaagaaaaccaagtcgaggctgcaaatagctcacagagagcaagaatagagacatggatattaaatgtggccaaaaggagaccaaacataggtgaccctgaaaaaaagagtttgagtagggtgagaaaagtagtactacgtaacaaggagtaagagaccggaaagtggccaatgcagactcatatttagaaactttggttttgcaaaaaaaggtcatgatagggctaaatctcaaaacagaaaagcgtgtttgtttgtgctcagggaggaaaaatcagtacataggaaaagaagtttaaaagagggattcattaatagagaaaagtagcaggtgatgcgatagagcttaagacaaagaacacaagtgtgggcggagccttcaagagaacctgacacaattcttatagggacatactgaggtagggagggaagttgcttttggagaaattttggttttggttgcagaaaatatcgagtagctaattgaattatcattgttactttgacacctgttaagcatgtattatattccaggaaccatgataagtgctttctgcatggaatttaattctcacaatgatcttatgagataactaacatttcgtgggataactcacattatatagatgataaaatgtaaggcttaatgtttaggcaacttacctaatatcacaggacaatcaaggtatgatgtaaagccagacctgtctaactctgcttttaaccattatccatgtccttctgttatgttggccttaatctttttcataaattaaaagagaacatcagccgggtgcgggggctcccagcattttgggaggctgaggtgggaggatcacttgcgcttaagagtttgagaccagcctggtcaacatggcaaaaacttgtctctacaaaaattagccaggcgtaatggcatgtgcctgtagttcaactatgagggaggctaagatggaagaattgcttgagcccagggggttgaggctgcagcgagctaagatcatgccactgcactccagcctgggtgacagtgagatcccatctcaaaaaaaataaataaatacaataaaagaggacatcatttgctgacatttagagtgagtgtggcatatgtttgtggactagatttgtaacctattttattacttagaaacatagtctagggtggacataaaatatgaaagcttaaatatacctgagccctaaatttctatcttgaacagagctgggaaaacaatgataagaagactcgttgttgccttacccatgaattcatgactttgctattctccagtagggagcagcacacaaccacctatgcaaccatttactctaccgcaaacaatacaagacaaagaaaaccttttgaagattcgaccgtaagtagtgaagaaactgaacctctgataattgggtcctgccttcagaaagcatttaatgaaatacgtagattatagttttgccctttattgcattatatatgcattagttaaaagagctattttgtcaatcctatttgagaatcgtaagagagcttcttagaaatgctcttgattatagattgatgtaaagagcaaataaattttaacttaatatcaaacataattcttaaaattcagagtaatgagaaaaatactgtaaagtcaatgcttggacattgatgcataaaagatatttcagcatttaaaactttgaagtataagaaagtactatttgtcaatgattaaataaaaaaagacacaataatgctataaaatgaaggttttattttttgtttgttttgcgttttttttttctttttttttttttttttttggttagaaggccactgggccatgccaagtttttgttataaatatgatacatcctatgtttgtgattttatgaatttggttcataacattgctattacattgaacactttgtttcaaaaattattttggggtgttgaaggtacaattactaccaaatggaagaaaaatcatggttgttgctgaagacacagaccagaaatgtaaaaatggaagagaaattcaaatcatctagtgactaagctttttggtttaagataaatattatgtttctggacaatcttacatttttttactcaatgagcacaacattttaaaattaaatacactagttctggctttagaatgttcaaaattaaccgtaagaaataagctttgttgtgtaggggtcaaggcctttggccctctggaggttcaaaaattcctgacatgaggcagattaataggagaaaaggcatacacatgtatttgacatgtatacagaggagccttcagcatgaagactcaacccccagtaagatactgaagcttatataccaccttgaggttgtagaaagacagttggttcagagcatgggaagaaacaggttatgctgttaaatcaggtttttgtggcaagataggtgatgggaggggcagaataggaggcttgcctagcaaaggtggtcttgctgtgtagacgaaaactgttatgggaaaggggtcccgatccagactccaagagagggttcttggatctcacataagaaagaaattagggcaagtctttacagtaaagtgaaaggaagtttattaaggaagtaaaggaataaaagaatggctactccatagacaaagcaggcccgaaggctactggttgcccatttttatggttatttcttgatgatatgctaaacaaggggtggattattcatgcctccccattttagaccatttagagtaacttcctgatgttgccatggcatttgtaaactgtcatggtgctggtgggagtgtagcagtgaggatgaccagaggtcactcatgaccatgtgggttttggtgggttttggccggcttctttactgcaaactgttttatcatcaagatctttgtggcctgtatatagtgctgtcctcctatctcatcctgtgacttagaatgccttaactatctgggaatgcagcccagtaggtttcagcctcattttacccagctcctattcaagatggagttgctcgggttcacatgcttctgacaaaacctcagaggtagaagccctcagagagattaggtggtgtctctttttggaacattaaaggtgtcagactctcggctaatctatcctagatccaggaaagggcctagaaacggatctaggaaacattagctgcattaatggagattctctacagatgcaaatttctgccacaaaagactgctttgcagggccacttcagtctgctggccctgtggcagccatttcaaaatacatccaagaaatatattctgcggtaataaattgtgacttccttcagtttagcaaccaaacatgagttttatatattttattgttagagtaggtagctagtcagacatgagcaccgcaggagagggagcccccctaccccccaccagaaatgtcaggtgaccatcaagtgatggtgaagtggttgttacctgtctctctaagataattggccacagccaacaccaggaaaaggcagtctcccaattaacacaaaaaacctgaaactagggatcagcagcttcctgataagatcttaggagttaggcaagtgggctcaagcacacacattaagaggcaaaatggtagagtttaactggtgtatggccttctagtgatattcagctggtaagggaagaacgcctcaaatgagcatgcatatagtttcactaaaaacactgtgcatgctcctctcccaagtgctggcaggacactgtgcatgtggacagcccacccaaagggaagaatcaggggagaagggacacatgaccccagatgaatgccaacatataaaaccccaagtcaaaggtcatacagggcccttgactctctcaactcacctgctcagccctctttcaagtatactttcgttcctgttctaaactttttaataaactttcactcctactctaaaacttgcctcagtctctccttctaccttatgcccctcagtcaaattctttcttctgaggagcaagaattgaggttgctgcagacctgtatggattcactgccaataacatcgttggtaaattcttcttactacctgtgattaaccattttctgttgctgaggctctgacacctcacctggaaccagtgacacagcctcaggaggtcctgacacgtgctcagggtgattgggctaccgcttggttttatacattttagggagatatgagacatcaattaatacatgtaagatgtatattggttgagtccagaaaggcaggacaactcgaagcaagggcttccaggtcataggtggattcaagaattttctaattggcaattggtttaaagagttaagttattgactaaaatcaataggaaggaatgtctgggttgagataagagtttatggacagcgaggttcccattatgcagatagaatccgtggaagggaatatttcttaccagtcttaaagagtctgttctatcagtcttaaggcctctgttttcatgttaatgttggtcaactgtgcttgaattccaaagggagaagggtataatgaggcatgtcagaccctcatttcccatcatggcctgaactagtttttcaaattaactttagaatgcctttggctgtgaggaggagtctgttcagttggttgggaggcttagaattttgcttttggtttacttctaataaagtttttggattttttataatttagttgaggtgtaattgaattgaaatacaataagctgcatatatttaaagtatataatttaatttgctgtgacatctgtatatgtctgtgtaaccctcaccttaataaggataacaagaatttccataactctgaaaagtttccttgtgccccttgcaactcatcccttcttctgccttgtcccaaggcaatcactaacttgctttcagtcattaccactttcttcacaagaatttgtaagtggactcacacaatttgtagaaggtataagaatggtgaataagcagatgaaaatttcaatgtttgtagtcatcagggaaatgaaaactaaaactacaatgagagtaatatatgcttatttgaattaataaaatgtaaaaggttgatgaccaaaccatgtgttggcagggtgaagcaactgaaattttcatacatgggtgtgggaatgtaaaatggtacagccgctttgggaaacagtttgaccatttcttcaaaagttagatacacctgtcatatgacccagtcactccactccagagcatttactcaagataagtgaaaacatgtcacgccaatacttttacatggatattcatagcagctttatttgtaatagccccaaacttgaaacaactcaaatgtcaatcagtatgtgcatggataaataaattatggcatatcaatacaatggaatattgcacagtaataaaaagaatgaactattgacacatgccagcaacagggctgaatcccaaagtgtgtacatttttaaagctttcctgcctttaaatcagaggttttcagtgagggagagtgaagaggcaaaaaaggaagaagggagatctggcttattgtaatcatgtaaagactttttccctaaatgtacacacaagattgattccatggagtatatcaggcagagaaaaacagaaagaatgctaatatatttgcaacttctttccttgtctcccttcctccatggaaatgtcaaacatgggaaaaggagaactagatatatttaactttcttggcaagtcttttgtcaaactacacagctttcagcttttcttaggccaaatgaatcctagatattgacagcatgaaaatatccatgatttttaagtatttctccaaaataggagagacccatgatgaataatagataggaaaccctattgagcaaatagatttactagaatttccaggcccacatagaccaagcaaacctgagagccacagtccattttcttttaagtaatattactttgtagttgttctaggaagtaatattacccaaaagaaaaaagaagaaacatcatgagttaatgcaactttgagctatctaagggataacaaaatcattctagtctttttattaagacttttacttccctatagcataatttctttataattggtcatcctgatagtgacaggaggcagccaaatgcctaggcagataggggcaggtacccggtgaaacctcacctccaagctgaagacagtttaaacctgaaatccaagctacaagctaaatcctgggactagattgagaacttgtcctcctgtttggtgtgctttcctctgattaatccccacccttcacctattttacatatacctaccctttcctaattggttttctatgcttttgtgcccacctttgactggtgtttttactttaacctttgttacatactcacaaaccaatcagcatacactccccatcctgtgcctataaagaccccagactcagtcagtggaggtggaaatgaactgactttgggaaaagacaacctgatttttgggaagattaccagtatacctttcctgtcccttctctagctccctctcctctgagagccatcttcattggtcaataaaattctctaccttcaccatctttcaacagtccatgtgacttcaatcttcttggatgctggacaagagctcaggacccaccgagtgtgggtacccagaaaggctgccacaccagccctttgccctcattggtggagggcagctgccccatgtgctgaggcaaagagccaacagagctgctaacacaccaccatccatggacagcagaactaaaggaacaccgtaacacccctttctggggcttcagggtcacagtcaccctcgcatggtcgctgccacattccccttgaggcgacatgcctagtctggctatgggccctgcatagagcttgttcctgtgtcggcaccctgcacagccagccaggtcctggactgactcactctgatgctccctcccacaaggggttgagtgcagagggccaagtagaggaggtgcccctgccatgagtccagcaaagggaccaagaaaaatcctgcatcaatcctttcataaagctcttccaatttcagttgtcctcttactatatattcagtcataagttttctttttgcaattcattctgagtgaaatgattgctgttcttgttattatggaaggttcttgattatggatttcagtgtggtatgtttgtctagatgcttccaaccggctcatgactactgtgacctttatttgttctcccgaaaagcaatcccccactcatctcaggtttgtaattagagccattaaacctatgtttttctttactcttttccttttcccatttcaatttcatctttcattgtccaataaacaaatctgctcttcttatttttcaagttgataatatggcacatattcagtgaatcccatagctctatgtatgacctagacaagggcccctgtccctcaaactgaccttccacatttgcatgcattccctatgtcttgttcctatatttttgttttctccagatgttttataattgcttccattgtctctcttacaaaagaagacccccccccataatagtaattaaaagcaatcgtctgcttagatcagctagaccaacatatgacaagcaaaacctcttagataataataggaccagtatcttcctccagacttgaagaaggcagatttttgggaaagtcatgatcagcatacacctatcacaaactgaaagacatgttagtaattgcagaaatttgatgaaaagtagagggaaaacaaacagcttcataaactttgcaacaaacaggaagataattatattttgcatttttttttaatgtgggaagcattttaatctcattgaagtatttatttctgtaaaacatactatcagaaatttgtaatttagatttaaaaattaagtttttaaatatctgtaatcaaatccaattaatgcaaaagagtgattttagtgtatgaattaatatatatcaattatagtaataaattaattactattaataggcataatgactcaatctttcacacaatccaaaaatataggttctagtattattagaaatctacacataggagactgaagctcagaaaaaataaagtaaattggaaaatataaacaaggtaaagcagcaacaaaaattcattgtgagagtattcttatgcaatcaaatgcataacagtgcaaatcccctcccagaaggggagagaaatgtctctaaattattgttctggaatgtttcttggaagaaagatttctctatccatggaagtaaattaaagagtataaattttctacagaggaagtctgtctccatctttccctggctctctgtttataaaagccttcctaaaaagatagtcgtagagcaaattggctgttatgcctgaatgtggaataacgtaagagtttaatggagaattgtctctcaacaaaaagcagttggactatcctcaatgtatctataaaggtgactaagttcagaaaattaaggaagtttatagagtttgtgacatagtttggatatttgtcccccaccaaatctcatgttgagatgtgatctccagtgttggagatagggctgggtgggaggtgttccggtcattcaggcagatccctcatgaatggcttgggacatccctttggtgataagtgagatcttgctctgagttcacatgagatctggttgtttaaaagtgtgtggcatcccccaccccccaccttctctctttcttgttcctgcttttgccatgtgatatgtctgctccctcctgctttgccttccaccatgattgtaagtttcctgaggtctccctagaagctgagcagatgccagcaccatgctgcttccttaaagcttgcagaaccatgagccaattaaacctcttttctttataaattacctagtctcaggtacttctttatagcaatgcaggaaccacttaagatattttcagttatctgagagttacccttgaaaatgtataacaggctcaaggtgatagttccgagaatttagcagcactagttgcaggactttggagcattaacagatacaaagactagttcaggtgatactgaggcgattgctagttttcagatattacaagaagggtaggtatttcatgaagcatgagagaaaaaaataaataaaagaagtgtcttctaaaagaaggaacacaaaacaagagagggaggaggaagtggagaaaaaagaaagagaaagagacagagagggagaaaaggtagcataaacacccaatgggttaattttgcccactgcccagatagatctgattcattaagacaggaaaattgcaatagagaaaatgtttaattcatgcagggctggctgaactcttggtgttgtatattctatgagttttgacaaaatgaatgacttctacccatgattataatatacaaactagttctacggccctaaaaatcttctgtgttttgcctgttcatccttccctccctcaacctggcaaccatggatttttttactggctccagaattttgccttttccagaatgccatatacttggaatcatactgaacataatcttcttagattggcttgtttcacttagtaatatggatttaagttttatgcatgacttatcatagctttatggctttatttttaagagctgaataatattccattgtacctcagtttgcttattcattcatctactgaaggacgtcttggttgctttcaagttttggcacttatgaataaagctgctataaacacttgtgtatggggctgggagcagtgatgcatgcctgtaatccaagcactttgggaagccaaggtaggcagatcacaaggttgagaccatcctggccaacatggtgaaaccctgtctctaccaaaaatacaaaaattagctgggcatggtggcgggcacttgtaatcccagctacttgggaggctgaggcaggagaatcacttgaacccggaaggcagaggttgcagtgagctgagattgtgccattgcactccagcctgggcaacagagtgagactctgtctctaaaacaacaaaacaaacaaacaaacaaaatacaaaaacacttgtgtatagttacttacgcccacatgtaaaagtacatttgtgtatagatagttatgtccacacataagaactctgatgaaaaaaccaaataactaaataaataatgagacattccatgttcatggataggagtactcatcaatatgtcagttcttcctagcttgctttatagattaaacacaattccagtaaaaaccctagcgagttattttgtagataacaacagattctaaaatgtatatggagaggaaaaagtatcagaatagccaactgaaactttacttcttaggatagagtgacctcatccaagctccttcaatgtcagactggaaactgggaatctttcagaggcttttcagtgtactttttgtcacttctgtgtttgtaaaaaggctgcagtcacaaaaataacagctagtttgatgtttaatatgtaccaggtattgtgttatgtactttatatacattagtatacctcttataacaaatcaatggattaggaaaccattattagggtcatattaacaatgaggaaactgggtcaggcatggtggctcacacctgaaattccagctgcattgggaggccaaggcaggaggattacttaagcccaggagtttgagaccagcctggacaacatgatgagacctcctctttacaaaaaattgaaacattagctgtgcatagtggtgtgtgcttgtggccccagctactcaggaggctaaggcgggaggattgcttgagtctagaaggtcaaggctgcagtgagccatgtttgcaccactgcactatagcatgagtgaaagaatgagatcctgtctcaaacaaacaaacaaacaaacaaacaaacaataaagaaactgaagctcagcatttaagtcacagagttacagagttagcaagtagtaaagcttaggtttgaacttgtagtagagcctgggtttgaacccaaggagtctggcttcagatcttacattcctgagcaataggctgagttgattcatatcacacaatattacttctttcaaaggtagcaggtgggagaaggaaggagttaataacaggatttctctcacttaatagtgtctatgattcctctaagggtttcactgaataaaggcacctctcttattgcagtttattcatcataagcagaatttcataatttttctccttattcttatttatatcatgttgtactaatctgtagaatattaaaatcactgtcatttattactcctgcctcaaattttttttctgaaatcattgctgccatcttagaaaacttacaaatttatagcaaaaaataaatgagagtcggtggctcaagcctgtaatcccagcactttgggaggccgaggcgggtggatcacgaggtcaggagatcgagaccatgctggctaacaaggtgaaaccccttctgtactaaaaaacaaaaaattagctgggtgcagtggtgggcacctgtagtcccagctactcgtgaggctgaggcaggagaatggtgtgaactcgggaggcggagcttgcagtgagccaagatcgcgccgctgtacaccagcttgggtgacagagcgagactccatctcaaaataataataataataataaacaaataaatgagagtgtaaagagaggttcctttcattctattcattttgacaggtcacctccttcttgtttaattctgtttgagatatcaaaggcatttattcacagcaatgcaaaaggtatacactgggttttgaaattcattaataagtcttcaccctcctttggtataatggcccttggattttatcttctgccattcatctatcctccagctacatgcttgtttttctcttttaatttgcagactcaaaggagtgagtcacaattttatctcctttcctatgagtagaatatttttgtccatccttaatataaaaagtaaaagtgataaaggcaaattacatgctttgattgttttgcatctctgcttgaaaaattatttttaaacccttcttaaatgaaaaatgttattaactaatttaacacagagattattttaaagccagtacactccacctttcagtaaataatgataagaatgttattgcatgttacttgaactagtgtacctttacttgggttaaaatagcacaccacgtttaaagtaatcggatggggatgattataaagtttagagcactatatcttcatgattttgaactaatctgaatttctattcaaattttaattctttctcctgcattttatgtcattctcattgatttttacatgtagatatggagtggaaagccattatgctcagataagtctcattcaaatttatttgataatcattgagaattgtgatgttcgggaactctaatgagcactttggattcactatttcattcagctttcatagaaatccatgaaggaaggtatagtcttccattttagttgagcaaattcggtttaaaaaaagttaaattttttattggtggttaaatttttaactaaatgggagaactagggtgaatcatctggtgaaattaaatcacacacttactgaatagagggggaaggagagacaactttcaacatgctgtggggagggacaggacttatgaaaccttggtagagagtggtgttagagcaggaacactagcttcattgatggagaggctcagggtgtatttaacagaaaataaataaacgtaaaagaagtttaaaaggacaagtaagaaagtagagatgattgttattttaaatttgggacatataatagttgaagcgttgaatgtcatttgaattcaacacttcctttatctctctcatctaaaaaggaaaaggtgccactcactgctgccatcagcctcttagtccttaacttaattaactcatgactattattttgccattactgtcagctgcattgctttgccaaagctttgtcagtgatatctgcatctttaattccaatggatattttccagacctcaactgaattgagctttttccatacttactacaattaattgctcttctctgatttcgaaaaattctttcctgtgttgcatcacttcacatcccctagtctgaatcttacttcttttattgctctttccttttcagtttcctttgcaatatcctcctctttgccaagtaactattacagttctaaggttatatcccatgctctttttgcttcctattctatgtccttagacagtctcatttgcaccagtttttattactatctacccttgatgagtcacagatgtctgtctccagtccagatttctcctctgagctccaaaccagaatttccaactgcctgctcaactctactgggatatattgaaagcctccaaattaatcatgttcaaaaccattctcatctgctcttcctcccttcctcaaactcgatcctcttctactgttccctacctcagcaagtcacaaccatctccaaaacgacccaccatcccctaccacatcttatggtaatgaattatcaacaagatatgttaatttggcctccagaatacatcatacttctgtctgcttttcttattctcctcccttagtgccctcattcaagttattattacaccctttagaagcattttgaatagttgcccagtcatatgtacaaccatactctttctccctttagtcattttcccacaggacaaagttatcttctcaaatttcaaatctcattatactatccactgagcacttgtttttaaactaaagacaaaatttctaatgtatcttaaaaggccctgcatagtctaatctttccaacttcacttcactctattctctcccttcctctttgagctccagccactgcagatttttacacgctctgtgatttttctcacctcagggcctttgcacatgcacttcttatagccttgaatagttctcttctttgatatcataactgaagcctcattcccaattcaaatttacttactcaaagaaaacttcctaacccctctgactagatcatcacttatgtattatgtacatataggataatatctattgctttcatagcagatagtgcattttatatgtattatgttgctaatttatgcaatggctttcttcctcttagactagaagctccatgaagttgaactcatacttgtttttgctcatcattgcagccctctaatttggcacggtgcctattctgtatagcacgtaatgcatattaagtctatgaatgaataattgaatgacttaacatagtcaaagttagaaaggtaacctttatcctacaattccacttgagatacatagtgtataccccttactacagtaactattttaagaacagacactagttttatccactcatatttcctgcaactgtctaagtttgagtacagtaagtgctttgttcacaggtaaactgaaataatataagtggaaataaaacaacacaaaccagtgttttgtttagatatttaatgttaaaagcaatgtctcccctactgcctaatcataagaatcacaaattcttgggtgttcttcagagcaacagaatcagggtagaaaaccagtgaatctgaatctgtaaatctgagaaacagcggtttaatagtgctatatatttatattaataatagacatagtgattagaaaaaactgacatcgttcacacatgtcttaagggaagctatgttcttcttttcttcttaccttcctttctttcttctatccattagtttatattgatacagtccaaaaataaagtttatttatgacagacctacaaatgttctcttcttttttcctgattcatatgtacattttgtattttatctgaccaattttttgctaagggcagagatatgtttgtcctcctctgtgataaggaaattattactcatgtcttgaggtaggagagacactagttaaggttgaatgctgatagtgtggttgtacctgataatatatgatttatcctaatccacaatggtgcaattgtgtcccatacattttactgcatattcttttgggaaatcttaacctaagtactaccatttttctaggttcaactgtgtgggctaaatggtctggaaaatagctaggctgaggaagccaggttaagattattacaacagcattttagtgaaaaattagagtgtcaaggaagaaacatgctcagacgaataacctcatattgattttttacaaagggacaagtggtttccaagagaaagggagagagaatcttgtcttttgtttggcatgttaaaatgatgataaatcagattaataacattctaatggttccaattttggaacaatcaagatttctgcctgtgtgggatttgggtttaaacattacaatttcatattttaaagatagccatctttatcttttgtaacttaaagatagccgtctttatttcatgctcaattcaccacgtagagttaggataaaagtcaagtccctgaagaacactaaggacttctccttacccagtgctttttttccataaagaaaattgcagtacaaaatctcttcctatattatctaagctctattcagaaaagaagagtgctggctgctggcagaagcccattatccagaaggtggccttaccaggttcaggacaatactccctccctgcgaactggcctttgtcagtcatcaaagctgcccttaactgtgagaaagtctgtttcccacgtatgtgatttatctaaagggacacaagtggtcccccatttcattgaaatttagtttgggaccactttatgctgaacagaattgaaaatgaggaagtagaaaaggtcttttccaaaaccactcacaaagtccatgcaataatgttattgatgttaacttatgtaatatttcccaaactaaattttctaaaataagagttgcataagtacaagttcaaaaaagaaggagttcttatactgtgttccttttttgaagatgcatagcagtaaagaaatatgttgaactttatttaaccttgtatgtcaaaatcttatttgaggaaactaatcccttgcagattaccacagactgggcggtttataagtagcagaggttgatttctcacagctttggaggctgggaaatccaagatcaaggtactggcggatttggtaacgcccaattcctggttcatactagggctgcctgctctctgtgtcctcacatggtggaaggggtgaggaatctctctggggcctcttttataatggcattaatcccattcatgaagcctccaccctcatgacctcatcaccttccaaagacctcacctccaaatactatctcagtggggattaggcttcagcatatgaatttctggggaacacaatcactcagtctacagcatgttaggttgaatgtttgttgtctcaatatgaggaaagacacctcatattgaaccttaatcattacacagtaacttttagggtgcccattcatatagttatttactaaaaattgaatgaataaatgaatggattagtggatggatagaggatagatgaacaaataaattaatgaataaaaataatccataggcccaacacaatgaatataattatcaaatataattatggtaaagatggaataagagttcctaaagtcagatgttactggtaagattaaccaatatttgcaatagatacaaaaattctgtcagatcattcttttaatcaatatgttaacctcttagaggatgcttcttctgaatctttttccattttacctctattttcttcaaatcccttccccttccccaaccacgtcatctgctatactacaaaacctctttatattttggctgggagtggtggcccatgcctgtaatcccagcactttgggaggccgagatcggcagatacctgaggtcaggagtttgagaccagcctggccaaaatggcaaaaccccatctttactaaaaatacaaaaaattagctgggtgtggtggtgtgcacctgtaatcccagccactcaggaggctgaggcacaagaattgcttgaacccgggaggcagaggttgcagtgagccaagatcacaccactgcactccagcctgggcaacccagcaagactccatctcaaaacaaacaagcaaaaaaaaaaatgaacaaaaaccccccacaaacctctttatatttttatcatacaacataataattacatgttaactgccccctgcattaataattattaatctctaccacgtaccaggcaccaggcactcttctgagcattccacacatattatctcattcatttctgtattctgagcagtagctgctattattttcctcattttatagatgcaggtactgaagagttaagggcctcactctaagctgtgtagctaataagtgagaaagctgagatatcagcccagatgtctaactgaagaacccttaattgtcactactcttctctatttataatctctccacactggagaggatgttcctcttattctttttgtctttaaaagcaagggcttttttgctcctgttgactaacattagcttctcatatacataagttcctataacaatgaataaaatgaaacccacatgcctacattgaaactccgactattattgcattacatagtaactattgttcatcataatgattacaagacactaagaaagggataaacaatgttgaaaatattctgcctcagaagacagaatagtctataacacagttaaactattcattatgctttaagataccagggtttaaaagaaacaaatccccttatagtctaaaaacaccctatttagtaaaaaaaaaaaaatcccatgtgtagtcaggtgttaaaaataaataatgtcctttgagttctggatcccagttttattatattctacttacacaacttgcatatctacacagagtttttactgtcaaaatttatactcagttatacttcctcgcttcatgacgtctcttattggaattttaataaaatatggccctacatgagctactcgatgaagtgatttaaactaaaacatgtttcccatgcaaccctaacatcctccgtcagttgatggttagagattaatgtcacaattagtatgtgggtatttaatatgccaacctcctgggtttggaacactcataaaatgctatgagctcagctgggcattttgttatcatagatcacaaaggtaatataaacagacatctgctgggcctctgccgagacagagtttgaagatagtcctctcatggagtaagattttatttaggcttaaaaaaacaaaaaaaaaaaggctttcaaagtggaaacattgtttcagcaggtaaatatcacaatgcattttgtagactattacatgatcataagaaagtcaaattgtgtacattcaccattcatgttctgagttcaataaattccaagctggttgcaatttggtctggttattacacatggggaaaaatttgcctcttcaaacctcttttaaaatagaaagtgacactaaccacatttttggaatttaaatacaactaagagatagcatagactgagtataggaacagtagaaatttattgaatctgtgagaagtttttaattcaatttttcagtaatgaaactccatgaattgtgtacaaaaaaaggtacaaccctcaatcaattggacttaaatttgtgagcttgaagaggactaagtaaatgctagtcttcactagttaattttttagaaaacacttatatatttggcaaaaacgttttagattttcatgaagcatgagctgacgtagttgactatattcagcaacttgatgctttacagctagaagacaaaacccttgaagtagctaggcttgatgaatttataagtttaaggaacaatgatagaagaaacttgaaaattttatgatgagttccctaagttacacacacatgctaggcggaggttgcagtgagcctagatcgcaccactgcactccagcctgggcgacagagtgaggctctatcttaaaaaaaaaaaaaaaatgtatatatatatatatatatatatatatatatatataaaatatgtaatataaatgtgagaaattcaaaggaaaaaatacattcatattacaaaaaactacaaataagagttcccctattatctacttataattgtagacattagaaagtcattaacctgtttattagttaccaaagttatattgcaaggtttgaagtgtaagcattttccaaagctctgtgataaaactttaatcaggtatatatgccttgttatctcttggaatgttacagacagtggtcatttatagtagaggttgttactagctttaatttagtactgatattttggtgaaaatatgttttaggtttgtaaagtggttgagtaaacagttcacaatctgtcctgacattaaagagacaaagactatccttggaaggctcaaagatagtaagggaaaaagactattaaaaatagagttgtatatttaaataggttacactgtagttattgtaaaaatataatttaaaagttgtaaaacaaaatgtttatggattttgaaggttggttcctttactattgtattttgttgctccaaggacagtgcttcatatgtcataaatctgcttttgcaagcagttagactgaaaataatgctcctaaacacatttcaagattcgtgctttttttctttttcttttttttttttttttttgagacagagtctcgctctgtcgccaggctgtgcagtggcgtgatctcggctcactgcaatctctgcctcccaggttcaagcgattcccctgcctcagcctcccgagtagctgggactacaggtgcacgccactgcgccaggctaatttttttgtattttagtagagacgggtttcaccatattggccaggatggtctccatctcctgacctcgtgatccgcccgcctcagcctcccaaagcgttgggattacaggcgtgagccaccgcgcccggtcttgtgtttcttatataatggacagataaatagttacagacctttttgatgtgctgcacttttgttatcaaaagactaaaaatccacttgacttgtgtgtcagccctcagttcagcagtcttacctcaacgctttgagacactgaggtggatctctgtttacagaaacatctatcaggtggcaaaggcaagggttgtgttgctttctttaacatggctttaggattctaccattatttctttgaatagtgaagggtctgatttcctctctacaagcatgtataacttttgttgacaccaatgaaattgggtaaatggctttgggagaacagagattgctgacatttatgtagcattatttggaatataaaataaatgtgtaaagcttaccaattggaaattttaccaaatgtactcaagattttttaaaaccttgaattgggtagaaaaaaaatgatggccttttactcatagtacatcactttctttagacatttttattattcctccctttcccaccaaaagcattaatacagaactgggaaccttaacacctacatacatacacatacatacacatgctctgttacacatgtgtaatattatttaaatgtggattgtctgttttgcgtactagtcacagagatttacctgacgttgttatagtgataaggcctatgaagaaggaagtacaagttgttcagagatcacataggacagatagtcagccaagaactggctggtaaaggaagcacttcttaaaaaagtaaaaacctaaaagttgagttagttagtcaaccaacagggagaagaagaatgttctgggagagaggatgtttgcaattgtatttataaaggtaaaagattgagctagcaaggtaaaaagatgccaggtagttaagaacatttaaacagtatggcagctggacattgttataggcattagagtaccatggaagcatttgaagttgtgtcatgtagttgcactgcattttagaaagagcatctggcagttgggtgaaaacactggaagtggcaagagtggaggccaccacagtttaagaaggtgtttcaggaatctctgcaagagagatgaacaagacaaggggcagtgatgatgcagaaaagcagatcattaaaaaaaaatttagaatgagaatgtagaataaacaaaacatgttgaataatttgaaatgtgaaagaaaagaatacgccaggcacagtgactcatgcccctaatcccagcacttcgggaggcaaaggtgggtggatcccttgagcccaggagttcaagaccagcgtgaaacacagtctctactaaaaatacaaaaaaaaattagccaggcatggtggtgcacacccatagtcccaggtacttgggaggctaaggtggatcacctgaacccgagaagtcgagactgaagtgagcagtgattgcccaactgaactccagcctgggcaataggagtgaaactgtgtcagttaaaaaaaaaaaaaaaagaagaagaagaaggataaaaactaatccagcttaaataactaagaggagggatagacttggaggtaataaatagtggtttgtttttttttttttttttgaaatgttgagttttatttgtctgtatatgtttgaagagacaggaagatatgcatgcagggatcaagagactaaccttgtctaaaaaaaaatgaagccatgaaagacttaagatttctcagaatgtatagaatgagaagagaagatggcctagtgaatattagtaatactaacatttacacaatgatcagggaagcttgaggagaagaaacatgagattcagcagaaaaaccagggaattatggcattctggaagtcaagagtaataaggacgctctccaggagacctcggtaaacaatcattggctaatttttttattaattcacattcattcattaagtttctattttgtgtaaagagcaggtggggaaaaacccatatctggtctctgctctcagggagtgcatagtaatatgaagaaataaaaataagttgaaaaattacacacataaatatttctttgtaaactttaataagttgtaaagagtaaaattatgggctagatgtggtggctcatgtctgtaatcctagcattttgggaggccgagagggacagatcacttgaggccaagagttcgagaccagcctggccaatatgttaaaaccccctctctactaaaaacactaaaattagctggacatggtggtgtgtgcctgtggttccagctactcaggaggctgaggcacaaaaatcactttaatccaggaggtagaggttgcagtaaagccaagatcagaacacttcactgcagcctgggtaacagagcaagactcttcttaaaaacaaaacaaaacaaaacaaaaaaaaacaagagtaaaattatgaagacccgtagaagtacatacaggcgaatgaacttctattccgtgaagtttgagaaccttgtcttaagaagtgaactctaacctaagatttgaagaatgagtaggcgccaacagggcttgtaggggagagggcagtcctggcacataatcctgcaagtggactttgatcctgcaaaggacagaacatgtgaaatcagggccactttccctgagtaactgcactcctgaaactttattttaacccagaaattatctcagcttctaggagttttaaaaaataaaatttaactattacttttaggcaaccagctatgcagggaatgtagacctatattgacaaggatattgaagtttgggacatttccacgtcccagtggaggtcactatggaaaatatggactcatcatttattaatttatgaaatactttttaattctcttacgtaggtgagatactatgggtatgaatgaatgccactttattcctttcaaaatcacctttattatttttgttatgatttttgggagctaacatatattggcccattttatgtgttcaattcagtgatgtttggtaacttaccaagtttttacattattctttaataaaatgtttatacattaattcattttccctcccttggatgacacgagatgttctaccaggcttaacaatgaaatgttgcccttgtgaaatctttcctaggggcaacattagatatctggttcttttccccaggaataaataacacttttaagccttcaatttaaacctaaaatgaaaaggaaatcacaatttttaaacataaaagtcatattttaaatgttcattaaaaatcttttgcataccattcctcttcctcattttagtaagagttaagacaagcttactctggtatcagttttcaaaagaaattgccgagtcacaagctgaggttatgttggtctgtggtggttgtttaatctactctgttcgttcataggtaagaaaaactaccacctaaaataaacgactgttcaatgtctcacagcggattggtgctcaaactgggatttaaaattaagtcctcaaacatagcccacgcttccctacagtgactgtgtcacccatcctaggagggaaaatatagttcaggggaactttttgccacagatttacaatgaaataccggcttagtgatttgctgttggagtctaagtttattgaagccttctaggagtgcagagtccaaagtataactgcatatgtgcttccactactattttaaggtaaagaacatcctaggaaaaacagcaaagcagcatggctgtggctttagatcatcaagcagttgtaggggagaaaagcaatatcttttcctcatctgtagctaggttcaaggctgaaacccctataacaaaagacagggtagcaagagaaaggcatgcaaatttagtagaagatttatgtgacacaggagtcttcagaaattaagacccaaagaagcagggaaaactatgtgttttaatgcttacattgaatgaaggctggacagttgatatggtttggctgtgtccccacccaaatcacatcttgaattgtagctcccataattcctacggtgtcgtgggaaggacctcgtgggaggtaattgaatcatgggggtgggtttttcccatgctgttctcctggtagtaaataagtctcacgagatggttttataaagagcagttcccctgcacatgctctcctgcctgctgccatgtgagatgtgcctttgctcctccttaaccttctgccatgactgtgagtgctccccagctatgtggaactgtgagtccattaaacgtctttttctttataaattacccagtcttgggcatttcttcatagcagtatgaaaaatggactagtacaacagtcttgtggaagtatgattgaatgaaagaggatatgatctaatggtaataagctatggggacgttagcaaggcctgttcaaattattctcggtttctcggtgtctttatttctttccttttggtataggaagtatccctctagaatgagggctttctgacctactttaaaggaaggtcagagaattcttttatggcttgcttcagggaagaatggtgagagaaagtcagagagatcttcttctttaagctgtcttctcaaatgccaaagtgctatattttgtggtacatgtcctgaaccctgtcacagtattatttgttcttttttaaatatgaaaaggaacacaattgtgaagatgaaataagcatttgtgtctgttttttatacatttatttatttatttttaagacagggtctcactttgtctcccaggctgaagtgtggtggcaccatcatagcttactaccacctcaaactcctgggctcaagctatcctcccacctcagcctcccaagtagctgaagacaacaggcacgttccaacatgctttgctaagtttttgtatttttaatagagacagtgtcttactatgttgcccaggctggtcttgaactcctgggcccaagcaatcctcccgccttggcctcccaaagttctgggattacaggtgtgtgccattgcacctggcctatgtacatttttattatacaattctctgccttttgtttccaaaagtgtaggtgattatgctattctgccacatgtatcattgtagtgcacaccatatgtgggaataaaaatgctaagtgattatttcttgaatagaggctaagcatttgtggattcaggtggactgacagactcacggacctctaactcctagggaaattaaattgtttcttttgctggtaaattatctcacctaccttgtgctttatataaatgtacacttgtataccaatattttaagtgtaataaaatattcagacttttaatgaataagatgattgtagcccagattatcttgttctttggcattcaggatagggtgctttatatgataaactttcttatgctaactctaagcgcaatcatctagttcttttctcccaggtaaggcttttaatgtattaaacataaatattctccattaattttgatattgtaatgcaattaatacttgatcatttttatttttcagaggagaaaacttacagcagtatactttgaaaaaacaattttcaattacatatgtgtgcttggttttgtcccaaactgaccactttagaaaatataaatgtctttcacataaaatactggctttgcctgtgtctcatatgttattccttatctgaaaggtgtaataattagaagaccattactgtcccccatgaattaaattagggtctttttatttcctttttctttcatttgactctatttattacttaactagtgtgacaaatgtggcttaaaataaaaacgttgctattattaatgaaaaatgtgctggtcgcagcagtggtgataaagaaaaatgtgacagagcactcattttcctcttgatttggtggagtggtcgctgggaaaaagttgtaataaacagaataatggaatggttaatgttttagcagaatgggattttactttgatttgctgaaaagatatacattaataagcagtcaattgattacaactcacaaaacacagttgtcaggcatcaaattatatttctcctactagtctctgtgagcaaatcaagattttaaacacaatacagataactgaaagacacactttacaaaattaataattacttagactaaaacaaaatgaccaaaaaagtaagaagatcctaaaagaacgatgtatctgtgtaacactacaaatttggagcagcttcagtagcttccttaatcataaactaaacttgactaaaatattacatattatgttttcagaatgttataatatactactgagttaaagtcaaaaaatatactatgattcttaacaagattttattatttgtttcactaaagttattggtcatctagatgtattgtttttaatatttggagggaaaaacctgtgatgtaagtgtgcccccatgtggctatagattggtttgtaagaatgtctgaagcattaatggaaagggggcttcaattggttatattaatattatcttgttaatatttactccatcccaagcacagagttgtttctcctgtttttaaagtttttctaagatacaggattctcagtttcttccataattcttacaatcatattatttttagtagtcatacattttaaccaataggtctgcttctaattctgaagtgtataacatagtaaagacacataaatcaacacaaaagacgtatgtttcctcatgtctaaagtatttggttaagtcaagcctaagtcattctctccaagtgtttaaaaatacattttataagtaaataggaagacgtatctggtaggaaattggtattaggacaggcctatggcctgagaaaatagtttgctatttatgtgatattttaataagactattattaagtctattattaagagtatatttgttcataattttttttaaccaataggatattggatattcatagtcaatgttggcgattccacagaatttgaaaccccttttccatacagcatctttgtggagttgattgcttccataatatatatgtgtgtgtgtgtgtgtgtgtgtgtgtgtgtgtgtgtgtgtgtgtgtattttatatatatatatttttttttttttttgagacagagtctcactctgtcacccaggctggagtgcagtggcgcaatcttggctcactgtgacctccacctccagagttcaagcgattttcctgcctcagcctcccaagtagctggaattacaggtgtgcgtcaccatgcccaactaatttttttgtatttttagtagagacggggttttgccatattggccaggctggtctgaaactcctgacctcaggtgatctgcccacctcggccttccaaagtgctgggattgcaggcgtgagccaccactcccggccacttccatattttgacacaaaagtatatctttatttaactcactagtcactaatcccaggatgcaaagtctaacttattggccagttgatgcttctggaaaattgctgtgagggttggttgttaatgaccccactgtatataagcccacatcttgtttctgaggtagtgcagtgtgttggcattataatcatgtttgagcgagtttgaatggcattcatttttgtttgtttgtttgagcatgtgactgagcagcaaccgcaaaaagcaagggcaccgacggcacagatagaagcctgagcctcagcttgaaatgcatgttttcattttaaccaacattactgttctcagtggaagtttcttcagggtagaagcaaacttttccatattttattttgttatatttaaaaactagccccaaatgctgtgcttctactctaactttttgtattaaacttttaaaagtgaaatctgaaataattaaattttaaaggttgcaatcattaaagaattaatacaaacatctatttaatttttttctttactaaaaattctcttttcttaattagaattcattatttagcatggcaatatttgtgatgatgaagaaaacttctttaagtgaaatcataatattgggaggaatttaacggttttctttttaaaaataattcaagataacttccattttcattttggtcatttaacgtactgtttaatgttctcagagaacaatatttcagaagtaaatatttatgcctgtcacttttgtgcacagggcaaaatgagttatgtactttgtttgtttgagatggagtctcgctctgtcaccaggctggagtgcagtggcatgatctcagctcactgcaacctccccaccttccaagttcaagtgattctcctgcctcagcctcccaagcagctgggactacaggcatgcaccaccacacccagctaatttttgtatttttagtagatacttggtggttcacatctgtaatcccagcactttgggaggctgaggcgggcagatcatgaggtcaagagttatgtacttctgaaaagcaaactgaaccatttctgaccccaccctttccacctacattgtctaaaaaatgaatcctaaacttaagtcagtaacatttcaaatgatatattttcctttatggaagagtctcttcacacttatggaagaaaacaggttgatgtagagtgggaagggaggaaagacaaagcgatgaatgaaatatagtatttgtaatatttatttaaaatctcataatattgaacgtcttctagcaaaacgttggatggttgtcatacagatagtgattcttagctagaaaacttcatggaatgcctgaactaaatgattgctcatgcttttgttcatgtgtgcttgatatcttggaatttcaaattaattttttaatataatttttaaaatttgactgtatttgttgataattgctctttgtttttgggaaaaaaagccacaggcacttaagtgaagattattcattgagttatgattatctttatgtgtttagaaggaaaatacatcatagaaaaatgaagtagcaacactgagagacagaattatctaaatccacctaaaccgcagtttggcaaattgtttaacttatcttccctgcaactcacctagcttataagaatttaattaaatatttttaagagtcctagctgacctaatattctgactatatatcattttccagaagtatagaaggataaatgatagtgagacatgctttttttttttagatggagtctcactctgttgcccaagctggagtgcagtggcgtgatctcagttcaccgcaacctctacctcctgggttcaagcaattctcctacctcagcctcccgagtagctgggactacaggtgcatgccaccacacccagctaatttttgtatttttagtagagatggggtttcaccatgttggtcagggtggtcttgatctcttgacctcatgatccaccggccttggcctcccaaagtgctgggataggcatgagccactgctcctggcccagacatgctttaaaagtatgttttgcagggccagacatggtggctcacgcccgtaatcccagcactttggaaggccaaggtgggtggatcatttgaggtcaggagtttgagaccagcctaatcaacatagtgaaaccttgtctccactaaaaatacaaaaataagccgggcagtagtggtgtgcacctataatcccagctactccggaggctgaggtgggagaatcacttgagcctgggaggcagaggtttcagtgagctgagattgggccactggtctccactctgagcaagagtgagaacctgtctcaaaaaaaaaaaaaaaaaaaaaaaaaaaagtattgcaaatggtagacaatttataaaaagaaaaaaatcacctgtaatcttcatagataacttgatttagtttgtaaagcaccaacttggttttttaaaaaggaagactttgaccattagaataaaatatgatagtcagaatggaccatgcagaaccaagggaggagctcaacatttaccttctaaaaatctgcttgttcttccttcccacttcttattcacaaaacaaaaaacatatgagtgctaaaacattaaattatttttctctcttgaagtccagagttgtcatcccaaagcccatgtggtcgtcagttgtcataatgttccatgccaatctggaataaaatgtggggaatgggcgttccattaaaaactattattcacttataaagccttacattgtgtatgtgaccatatacttccccctctcttcaaccagggtagtgcaaaaaaaaaaaattaataaattattgaaattttcaactccaagagtaaattcagcattaatgatttttttaaagaaaataatgtaggagataaaattgaatatatttattttgcaaatgtaatttcatattaacaaagaaatgtatagagaacatttcatttgcagctgcctaacagaggggtaattgactaataaatgcctcatgcccttttaaaatagactttccaggccaagagccgtggctcatgcctgtaattccagggctttgagaggccgagaagagaggatcacctgaggccaggagttcaagccaggctgggcaacatagtgagacactgttactataaaaaaaactcacaaaaaacaaaaaacttagctgggcatggtggcatgcatgtgtagacctagctactcaggaggttgtggtgagaggatcgcttgagctgaggagttagaagccatagtgagctatggttgtgccactgtactccagtctgggcaacacagtgagaccctgtctcttaaaaaaaaaaaagtctctacagtactggcatggctacattatcaacaaaaatgaatgcctctcaaaatctggccaatggaaataatattattccatatttcttcattattctatgattacaaatagtctgcatgtagaggtttatttccaagaaaatccagtgtcattgatatgtactgttacagttaccaaaatatatcagtttttagatataaggacatcaaagacactcccattccccatgttccaaagaaatttaaacttatccagatatagatgataacacataaatatttttgtgggaaaactttttgctttacaatgctagttatatgtctagataagttaatgtctattcaaactaaacacgtcatacagcaccttttcttttatattttgaaaagcatacatgagcaagagtggaagagaaaatagttgattagaaaagcccacagtcttttagattctctttgattattatatctgtaactgcgtcaaacacaaacttgacattttgggtgtcagtagcacaggtcatgtgggaataaatttccttatcttctttttttaaattcaggtctagaaactggttcttgatgtagtttcctgcatcttcaaatgtatttggcccttgttaaacaaaatatttgaagaagtaaagattaatcatatgttacaaagaataggctataaataatatcagcaaattttaggattttactttgatatacaaagtattgcaaaatcataaaggcaacggtcaattatcagggtgctgggaactatgctcacccctttgggagctcccggtggctaaaaggtaaactttgcatcaaaaagctcaaaatacagtagaaatcccaaaatatttataaaacaaagtgagtgatacaaacttacgtatacatcaaacactgtgtgtgtgtttgtgggtatgggtatgggtgtttttatacaaattaaaagagaaaaagaatggaaaaggtagatgactaaggcacagaaggagatggtatttgagctggactttgagaggtagctacaacagagaaaagtaagtgaaaacaaaaaagtgaaagtgagaattgtagcactagacttgagggtagggtcgggaaacagactgagctttgaagaatctacttcgatagaaatgaaagatttttgtagaggaattgtaggaaatcaagtagaatagatgttatgggctagattatagactatgttactaacaaaacaaaggagttaggatgcgatataaaaggctatagagaggtactcttcactgatgtgttatatagcagtaatacaatgaaggctctgcttgagaaactttagtccaatagcaggatgtgcaatgaatcagttgagaaaaggcagaaataaaacaagtaggctaaaaaatacaggactactaaaaatgacctgttgatgggctttataacagaatatgctttaaggggacttgacacagaatagagcagtagcataaagactttctaaaaaataagtctttgtttcctactttattgtaactagaaacaaaattccttgaaggacaagctttaaagccatataacatggctaaaatccaaaacactggcaataccaaattctggtaagtgcatggagttataggagttaattgcttgtggaaatgcaaaatagtgcagtcactttgaaaggcaatttggcagtttcttacaaagctaaagatagtcttaccatacaatccagcaatcacacttctaggcatttacctagaaacttatgtctacacagaagcttgcacatggatgtttatagcatctttttccataattgccaaaaattgagaggaaccaagatgtccttctgtagctgaaaggataaactgtggttcgtttaaggaacagaatattaatttaggaataaaaaaattagctatcaatccataaaaagacatggaggaaacttaaatgcatattgcaaatgaaagaagacagtaagaaaatgctacatgtcatatgattccagttatattacattctggaaaaggcaaaaggatagaaacaataaaaagatcagtggttgccaggagtgtgaggagggaggaggcatgaatgggggaacacaggggatttttaaggcagcgaagctgttctgtataacactgtaatgctggatacatgacctgcatgtggcaaaacacatagaactgtgcaacataaagagtgaaccctaattaaatgatggacttggccggggacggtggctcatgcctgtaatcctaacactttgggagggcggatggatcatctgaggtcaggagttcaagaccagcctggccaacatggtgaaatcccgtctctactaaaagtacaataattagccgggcgtggtggcgtgcacctgtaatcccagctactcgggaggccaaggcagaagaatagcttgagcccaggaggcagatgtagcagggagctgagatcgtgccactgcactccagcctgggcaacagggtgagactccatctcaagaaaaaaaaaaagatggactttagttaataatgtaaaatgtgttaatatcaattcatcaatataattcatcaattgtaacatatgtaccacaccaaagcagttctctaataatagagaaactgtaggaggggatgggaaagaaagtacatgggaactctttgtactttctgttgaaacatttcatttctctgtacactagaaactgctctaagaaataagtcctgttatatatataatataaaacctttaattatgagtttatatttaattagtaatcaatatatttgaatattatttgtaatatgcaaaatatattattatacttaatcacatgataaatgtatgaatatattataaatatttataattatagaaaaaagatataagccctaattgtaggttgaccaatgtaagtatttgttttgataaaatgccatggtcctagtaacatctgggcaaccttacgcacctaagtggtaaaactggatttgtatttttgtttaaatcataaatatggctgggtgcaatggctcacacctgtaatcccagcactttgggacgccaaggtggacagatcacctgaggtcaagagttcaagaccagccttggcaaacatggtgaaaccccattactactgaaaatacgaaaattaactgggtgttgtggcgtgcaccagtcgtcccagccactcgggaggctgaagcaggggaatcatttgaacccacgaggcaaaggctacagcctgagcgacagagcgagactccatctcaaaaaagaaaaataaatatttttcttatgtaattttattaccaatggaatatccaactatttacaaaaataaataaataaataaataaaattctttctgaaggagaaacagcccttctgtgggatttcacacttacaatcgctgactaacaggattagcactaaaattccaggatccacgaaaaccggaaaatgaagatgtcattattcattctcaaattcattcatgctatatctctagaaacaactcagagattgaagagcctctgagatctactacagcattacaaggtttcagtaggagatacattaaaaatgccaatttcgaataagatttgcattcctgttataattttgaagacaattcaggttccaatgtcatttgataaagtctatagagtagcaaccctggtccatctaaccccttccagtttattttattagggttttgctttaatgtacacaatgtagagagggttcttctttatttgtaagattttttttccagtttggatcataaagataactcaaaaatgatcataagcctcatcctcataagtattaaatgtcaagatccagataggaaatatatatttatacaaaaatttatttctatggaactaaaagaaaaaaatcttaccagtgtattctggaaagcagatactaagatgcaccttggttaccttttcttgaaagatatcttttttgttgaggaacaggacaatggaggttgttgaaaaatacttgtgattacagatactgttgaacaggtgaaggctttcatgcattctattctgttaggtatcagaaatgagaatgggtaggattattatttgcaaaatgtgaatgttgagcatcatgaacaaggatctagaactaacataaatctttggcaaaccttcatgagttgggcaatgtggtagtactactgaaaagcacaaagattacttttaaccctggctttgtttttcctttagacttaccacttcttcgtcttccacgaggaccatgtcataggcactaagtgcagcacaaaatataatgcatgtaactccttcaaagcagtgaatccacttctttctctcagatctctgtccacctacatcaaacatcctttaagaaaacatcaaatgaataataaatcttgcaaatatcctccaaaatgtgcattgaggttaacatttagaggtataaatgggtgatcccctatcttcaaaaggtattcttttgacttttattgattataaaattaaatttatttggtcaaatggctgctcaaggactacagagaaaaaacagtcttttaaaattgtctccgtgcaaactagaataaaataatttacacactgactttgagaaactgggaagtttaaaagagtttagagttttggtaaaacattcattagccacagaagattttgataaaagtttagacatattctcttgaatgaaaagaaactgcaagaagattggaagttactgtagttctgatgttatgattcttgcctattttcttaagtctttctacattcatttactcaaacaattattgtttgcattctatgtactagacactgtgctaggtctactagcacaaagatgaaaagatatggtccctatcttcgaagaacgttctgtcttgtagagaaaaaaacaaataagttactataatattatgtaaaaaatattctaatatacaaggtaaaatgtgagcatacagaaagacttaagttagcctgagggatcatgacacttagagaaggtgtttgaaaactcagcctttcctctacttttatattttggtaagagatcattgtggatcgaggactcaattttaaaaactaggagctaggcagtaaaaagttaggttgatatcaaaggagctgtttaatgtttgctgcctcagggctttcacacacagtctctttccttttcctgtgacaaagatttccttcttccttccaaggttgctttttttctcaactatgaagtcttagcatcaatatctcctccataaagaagcctcctggagcgtccatttaaattacacctctctccaccctccatttaccttctatagcatcactttctttcctttatggtaatcatcaatatctatcatctccctaatacaatagcagcctcatgaggtcaggaacgttatctgtattagtaactgctgtattcctagttcctggcaccatgcccaacacataacaggcatgcaaaaaatatttgctaagtaaacgaatagattccatgttaactgaatagagaggcaggaaacacagcaaacatgctatgttctctcatgccttgataacttacacatgttttctataaatatgtgtaagttatcaaggcatgagagaacatagcatgtttggggtaagcaagcaatttatagttttgggaacataaagaataaggtaaaaacactgagctatatggcctaataattatcaatttatccactcattcatcctttattcaataaatatttactaagcacttattatatgccaggcaccaaggattcagccttaagaagcttttaaactggtggtgatggtggtagtgattggtgtgtgtgtttcaaaatagactttagatatcctataggatatccaaaatggattcagatatcctatatggatatctgaaaatagacttaataggaaatatccatatgaaaatagacttcagatatccatataggaagtgtagggggtgggttgtcatttgaaatggagtgatcaggagttgtagaagatagcagaagtgtaaaaacctaaggagatgaggggttgagccaaatggatatctggagcaaacaatgttataagcaaaggtgacagaggaaacagcaagagcaaagtacttcaggagtgagcctcatgtgatcagccagcagtggatttactggtcctttcatgttacatgagaaatgtagatttcatattgcagactatagaagactatgggtgatttttagatagggaattgacattttttgtttgtttgttgttgtgttagatcactttgatctgagtccagaagttgggcttaatgaggaagagattagaagcaaagaaataaagtatggggctatcataatagtttacaaccaaggtattaagtaccaaaaagcatccaagttgtacagacttcacgggtaatagttatatttggagtaataaatgtctaccgatctgattattgaaaataatcaaaagtacaatatattatacttcgtatttcacatatgaaccaagtaaagatatatataactaatattccccaaataatgtactaatgcaaaatcactccattaagcagtagactaaaagagaagatgctcacaatattgaagataatggttaagagttcaatagttaatagtgtggaaatttaaatttggtgtgtataaagaatattatatgtgctactaattaccaaattgcagtttcaggcttgcaaaataaatggaggaaggggaccaaagtttgactttacggttatattatgtgaaaattaaccaatacatttaatttttaaaaattaaacaacattcttacagaaacaaggatgataaatatgcattcagaaatttaaattgttcatgaactgttttgttagtccataaaaacaaccttagtgtttttcagacttcgtaaactggagttttatttctttctttgttgaaattacttttaaagtataaattacatttaaactataaaatgtggtggaaatagaaatagttgagatcatgactttcatgttccacatcaccagttgtaatggattaatcttaatttaacacacctaataagagtttactatttgtcgggtatataagcaccttacagcaattaactcatttaaacctcttcaggaacttgcaaggtaggtaagtttagcattcttattttttcagagggacccttaagcaaattgcctaagaattattatttcagctgatatttgttgaggctgctatgtacctggctggcaccacgataggttcgatagattccgtggctatgatagctatgctgtgaaagttgttaacttgctaagtctatttacttagaacagaggtgcacaactagtactagtgcctgcagttggctctcaaaccttcactagtggacagaaattatcttcactgtggagtctatccttctcccaggccaggcagtagttctatgttgtcaaacaggtcactgggcaaaaaaattaaactcccttcttctgggaggtttcgttcttttcttttaatgaagataatcacctaatgcatttcagatgtagtacatataggctccatttggtcatatatgaatatattgtggatcactttttggcaaagaattgtgatgctgtgattgaacaatgatgattaacttatggatttgggggacctgagggtagagtatacattactaggtttaaactcctggtgggcttttcaaactgaaaccaccctttctaaccccacccacggggtttttaacccataaggatttccatagtcctaatctctttcactctaatccccacctcagggggggaaaataaaaaacccctttccattgcttaatgacaaaccagtcatggagccaagacaaagagtaatggaatgtttgtgctaagggagcccgatgtgccatttccacagcagtgatggcagggctgtaggaatcgaattctaggatgcctcaggtaagttttctccactaagcagaacttgcattagtcttgtcaacctttgtagtctccttttccctgcttttatgcccaattatgccattttctttcattccgattgatatttgtattcttttagtcacattttcaattagattatatattgttagattctattcacatcttaaaagtctgagaaactcctctctttaaggtgactttgtaattgctcagatttcctgcagagtgaccaaatattttacctcagagaaaaatcatcttatttctctcatgctaatagttttgttttttggtgtgtggggggttaatgataaaaataatagtaggaattaagatatgggaactctaatttgtgggttctatgggggacataaactccccaggaggaggaaaaaaagggagcctcatatacttcctacatattttattttctacaacataatgttttcaaatggcttttctccaaatctgaaacatctgaagcatctctgagatgaaaatcagagtaacagcaaactcaatggctatgtcttaatttgctctgatgagtcagcttctttgcagcctactaatgatgtgttaacaggtgtaagaggtagctattctcctcttctgataaatatgtacaactgtgataagtaacaattgcaggaataataccttacggttgaataaaagtcatattggaattgtgtgctctccctgaaaaataaattctaatccatggccttatgttcctcataacaattctttgaagggaaaacagtatttacccatttctttaccaaaatgaagaaactggcctttgagaggctaaggtggtttgttcctaaactcacaattagtaaaggatagaactcacgtactatgacctttagcccagtgctctttcagcatatcatgcagcttctaataaacatgttttaagtggcttggctttctcccaaggaagagaggacaaagattgctcagtcttagcattttgttcatatagataaaatggattctgaaagtctctcttaggttgaatgcttataatcgtctcattttatgactcatttgataaacaatatttttgtgtgtgcagattgacgtaggagacataggtccagggagcactgcacatttctctaatgccatctgctattattgaactgaaatgctcattagcaaatcagatcaatagccagagttttgtttttgtattgattctcttggacactatgttagctctaagactagttacattttgttttgctaatattgtagtcatttatttttcatacttttcagttttagcttttccccaaattttaatttagtccttattttatggaattgtaaagtattactacctatgaaaacaatttggagatccccaaagtgaagtaattgcttatatttttggccgaaggaatattctcccttatgcataaaaatgaaatcaaaacaaaaagctttattgtgaccattctgtgagagacaaaattaaaatcagagaaaacatgtatatttgctgcccggagttttggattggtcaaatataatagattattaatgagggaaatggacatgcttgaatactcttaactccctgaataaaataataaatcttaacttccacgatgttacatggaacttacagtcctcatttgggattttgtgtggggttttttggtcttatttatttaagttttttttttaaggagggataatatgtattttgttattaagtctgacacttgatggacttcttaaagttaaaaaatttaaataactaaaatttatgatgtagctaaaaattgacaggccaggcttttaagtgacagtcgaacactgattatttgttaaattgaccaaggcattaatacagggcaaaccatcagagttttacggctttatattaaacagttgactcaacagttgagttttacagttctagtaagcagtcggcaaagctttgagctttacggtttatgttaaacagttggctaaatattggatcacatgagattattcacatttcatatcagaatagattattataatataatctgcttataattcttgtaaaattattatataatctagagtagctaaaaatcaacaatgctactgcaggtaatttatttgttagatgtctttgcttatcctataagcatgtacttatctttgaaaaatcactttctgacattctctactatgtatatgattacataaaaataaaactcaatctgagtaggaatttattttaaggtattctattgaatgggatttattcaagatgttagtctctatcgcagttgttataatttctcatcatggttacatatgagaccaggtggatctgtgtcttcactacacacccatagcaaatggtctaaccaatctttcccttgtttctggtcttgaaaacagagaatggtagatacttgcagacaggaaggatgtgcacagatgtcttactaagtctcttaaatcctcacaattaaaaaacagaatcaaaagaatttataactgtaagggagccaagctctccaaatcatcagaatcattaataccattatatactttctactaaatgtgtgtgtgcatttgaaacttcaaatgcccactagataattctccgattatttaataatgtaattcataaagccatcacaataaattctgtcactagaatcaattaaacatcatattttataacttattattttggtaatactaaccataaacatgcctgaaacaaatatatagtatatatgagttattgctctatgagatcttataaagactaggaaagccaaattgaaatgtagctgctggatggacagccagattcactcctatctgagatgattcatatgccacacaaatgaccacgatatacacaattcaacgtcatatctcaggaaaaccgtagtttcttttatatcatagatctgctcaaacattcttataaacagttatggtaatttatgaaatctaaagctctgtgttgtaataattgttaaccttttttccttagctcccatatagttttaagtcctttcaattctgtttttccatcatggaaaaattagggagaaagtttcttctctataattgtctgctaaatccctgtaaatacatgtctaagttatttgttctgaggaattattctgtaacaataggagggctcacatttgctctgcattttccacttacatagtacattaatgtctataaagataatttattttatcagtttgacagttgcagttctggtttgataagaactctacagtaatttccactgaattagatgatacacaattatgatacagtacattggcagagataatttttcattttggtgttcctatgtaaaattttagagttatctaatttagtatgtaaattgagcctttggttttaaatagtcataagacatcttatgctatgtgaatacaaatcaatgctaatgtaatatattttaacacctgggcacttgctgaaaaaaagttggaaggtacattatttttatacttcctattttgaaatactacagaattgtacactctaaaaccctgtgcacttttggactatcctatttagcacttgaaataaaagctatttaatggtgagaatttattaaaggattaatatatcttaattgctctaactaaacttaaaactgtatttaaataattttaaatagctcctcaagaaaaagatattttaaaatattttgtaacaaaatttaaatatttccaaattttattgtttaaataaagacttgtttttagaaaaattccttgcattggagtaaggaggtactgtatcttccatcctcttcctcactgaaaatgcctttaataacattgtcttgagtcagaggaaaagcaaaggctcttaaaaaaacaagcttgatacctgttttagtatatagcgaagaggtggtagttgcacagtaaagagaatgttcttttttttttttctttttttgagacagagtcttgctctgtcacccaggctagagcgcagtggcgcgatcttggctcactgcaacctccgccttttgagttcaagtgattcaccagcctcagcctcctgcatagctgggattactggggtgtgccaccatgccccgctaatttttgtatttttagtagagacggggtttcaccatgttggccaggctggtctgaactcctgacctcaagtaatccaccagcctcggcctctcaaagtgctgggattacaggtgtgagccaccacgcccagccaagagaatatcgtatcaaaataatttctagctgggcttcacaatccaattcacaaacaccttacactttagcattcatactgtaatagagaattagcaaaaccctcctcattgcttcataaggatcaataatatgcaaaagcaaaatagctcaccttcctatatgatttaagatagtgcttcacaaaatcacaaaactacaaaaggacagaggaaaatgactatgtaccaaagggggtctggaggtctaaactgaagagtcctattgtaagaataaaatgtattttaaaattaatattttattttaaacattaatgcaaatgttatattctactctgtgatggttaatactgggtgtcaacttgactggattgaagaatacaaagtactgattctgggtgtgtctgtgagggtgttgccaaaggagatgaacatttgagtcagtgggctgggaaaggcagacccacccttaatctgggtgggcacaagctaatcggctgccagcacagctagaatataagcaagcagaaaaatgtgaaaagggaggctggcctagcctcccagcctacatctttctatctctgggagggcggctgatgtggtggcagtaccagctgaggggaactgaggcggaagaaagatgtaggctgggaggctaggccagtctgtcttttcacatttttctgcttgcctatattctagctgtgttggcagctgattagattgtgcccacccagattaaggatgggtctgcctttcccagcccactgattcaaatgttaatctcctttggtaacaccctcagagacacacccaagatcaatactttttatccttcgatccaattaagttgacactcagtattaaccaccacatactcataattttcaaaattttatgattgtttatattactttgttcagagtgaaatagatgtctcagaaaatgaccatgattttctgaggatttacgtgtttattggcagttgtctcgtaccctggttttagaagcactgacttataaaggaccacatgaccctccaacttaaagatagttccccaaaaggctgtcattttatcctccctcccgccttctctctgaaagagattataaatgaccaacaacactgaaaacaacactctacagaaaaatggttttcacccaatttatctaacaactcagtgccatacagtgtaaggagtgtggtctttgaagacagaaagatatgcattttaattccatctctagcacttccgtgaaagaccttgggggaaatcttttatctcagtatagcctccagtttttgaggctatccagttagcctcaggataaccaagattgcttatcctgagtatcgatagcaacactcagctcatggtgttactgtgcaagtataaagattgtgtatgtagagtgtttggcatagtgcatttactcattcagcaaaaattaccttcattcttactctatgctagccactataataagcactggaagtagagctataaatagacatggcccctagcctccaggagctcgggggcatatgagatagaaacagaaacaaaaagagaaaactaataaagaagcaaggcaatctcatatattgataattttttttaaaaggaaagcaatgtgatgtatcaatattgcagtggctatggctcaccctggcttagctagtgagagctgtttatttgcatttctcctcaactctgcatttagtgacatcaccttggttgactgaaattgaccatggtggggttatttgcaccagaaaaatcaagagctacaatcagccagccctccatcgccttactgccccagaaaccctgctgttaaacatttatgagcatgctgcagggtgtatagtgacagggataagcatggatggtacatagataagatggttatgcctccatgaggatatgcatttgattttggaacttaatcataagaaggagatgtttcttgcagattcaggggcagagcactttaggcaaagagactagcaagtacaaaggcttgaaatgttaaagaacagatacataaacaagataatttttgagagtgatcatttttgagacaataccaaattggttggtgttgtagggagtgacttgggtagtgagcttttaggtattcaacaggtaacatcacttgtccaaacccgtttatggtccagacaatctaggacacagagagttctactggcttatgaaaggtaagctacatcaagttataactctctactaggactttacttcatctaatctttacaacaaactcattaggcaagcaaataaagaaaaggttaactgtgtttcttaactcctactgctaattattaggtaacctggaattggaactttggtctgggcagcctcaaggcccacactcagttctagtctgtttcagtgagacatctggagaaaagaaagagtaagacagaaaagggacagtgtcaaaaatgttttcactggcgtgggaggggcagagggggagaaacaactggactcagggcctcaaaggaaaacccagaaactggatcaaaggtgaggagtctgaagaaagtagttgccaaaaagaactatacaatagtgaagccaagactgacgacaaacttttcctacatttgccaagagaggatgttgatcccaatcggtgcagtccctttaccctggtttaatctttggctcatctttcagaaaattaactatttgtgggcctaaaatttagatacgaattttgaagagtttttccgtattagttgaaaatatactatctacataataggtattctacttagatattatatataacacatactttaaaatatttgaagcttttatcttactaaaataaatttatgatgttgattaattaccattttctttttcctcacgaatggatatgaataattcatgccactctatctccagttttttactctttaagattattctcattgtttgatacaagagtaattttattagttatatttttattgatttttgtcattactaaacaatgcagctagaacctgctattaatgtttaatattccatattgtccacaatccatacaaaaaggtatttaaatattaagggatattttctaacattatagtatgggtttccatttcttggtatagtaaatgagtgattttgcagtagaatttctaggaagctctcgataatataaccgcaatgaaaataatgattcattttcatactcaaaacatggttataaaatatgccttgttattgcagtaaatagtatcatattcaaataattctcatcttggtaatttgcattttttaaaattaaggaaacagatgttataggaatatttcaagcaaataggaaaatagaaaggcaaaggaaataggattcctggcacccatttcttgtatgttatttaaatacattttcttttttttccccaaagtacagtgccagttttaagcatgaggaaagtaaaatctagtccccacctgctcaagccagaagcattttagcctggaaggagggatgaggctcaggatgagaggctggggtgagaggctatagaaggacagtaaaggacagcggtactgaaggtaaactagagctagtgagtacatccaaggattattgaacctgaacatgggctagagcttttctccatgaggaaatattaagcctgatgcatacttctgtctacagttagaaaagatatttgatcatacctgaagtgcaagtctttaaaggagaattgagtttcaatgattccagtcgttttcactcgagaatggagaacatcttgttcatttggcacatacccagatgctgttattctatctaaatcattaaggtagctaataaagacaaaacaaaattatatatgtgtatatataatacataaatacatacatatatgtatatatacacacatacatacatatatatgtgtgtgtatatatatatatttttaactttgcgtttgaagaaaccaggattcagtagaaatgaatttttagcgtaggttctatgaaaaatgataaattctagacaggcgctttccaaactatgctcatcgaattaaaagtttggtagctggaatgttgcagaatgcagagtgctgaatgtggcacacagctgacccccagcgtcctcttctaaaggcacctaaatcaacattgccttaacctgtattttatgtggtttgtgtgataaatttgcttgtatatggataggagtatgaaagaaaatttctctttatagtgcctggatcattacaaaactaaaagttgccttatagtggtagtggctagattatcctcgaaattctgtagtttgaatttaggcattttcggttttatgagagtgattggttcgaatgtactaatttgaaggttgtttgttatttttgcatgaatttgcctcatcaagactcagccatttccattaaatgccattgcaatatctagttagcgcaataaaagaagtaccatttgtctctcttcctggtctatgctggaagtgactcatgaatttgcaaacccaccctgacctggctctcctggggacagaagggtgaacgtacccactgtccccactcccacctcctcttccatcaatgcatcactgtgtctttaccccttccaggaagctatattaaaaattgttagtattaacaggctgaatatggtgtttttttcccctcacaggatctaggtgtggtgatgaacaggaataagtctaattaaattgtgtatgctataacagtctgctaaattagaggaaaaaaaacctgctctcagcttcctaactcttgaaacgagataatgtcttcatactaaaaaaaaaaaaaaaaagtgttttattgctttaaaaataatttgaaaaccactggtctagacttttgatactaagcttttagtggcttagcaatatcactatttctgtaaaactttcagatacaaatagtaatagcatggtaatgcctttatgacaaatttcgccattacactgaaccacatttatagaaagataagattcaagtgcttccatcgagacagaatttgtgaggtagaatccagctgaatgttagtcagtgttaaaaattgtttgttcagtgattaagctgagaagctgttacgccttagcacctagcacaaagattgaaaaaacaaaattattttattagttaaaaaaattcattattaatataggtaatttattcttggaggatctttttccttttaagctgaaacaaattaaggttggacaagtgtcccaaagggatttcggccgagagtaaaaatcacacctcagaaacacataacatatataatatgaaaatttgtcaccattgttttattctaaaaaagcttaagttttcttttgaaaaaagagtgaaacattaagatgtaaatgtattggaaaaagtactggcaggatttgctagtgtatttattttctattttggcaagcaaatccctttgtgaattttctattaattaagtctgcatgtgtggtaggtgtgttgttggtcagttagttcacgcaagagtaaaaagaaaacaaaaaaaacccaaaaatatacctaccaaaataaagattaaattcatttcatgatacctaaatgaaaaccttggtaaggacacatttatttgcatgtatgaatgatttcaagcaaagcagaagcattagcagactgacaaatttgcatttaaaatgcttgtttaaataaacaaatatggaatgtgggagttcaagtctataatctaaagcttagaccaaatagaggcccttaacatatatgaatctaatcatttaaaagtactaaattcttttccaattatttaaactagtatttttcctggtgaagtctatggtaattcttaaagcacatggaattttaaaggcacactagatggctgcaattagcaaaccatgcagtcaactaaaatgtttcctctgattatccctgccatacccctcttctttcaatttgctagaactgatgaggttatgttgccaactatggcattcctttcccttattctgattatattcacttttttgttagccttaacttgaaggatctctagatttgagaaaacaagaagtatcttacttttaccagaaaaagaaaaaagtgttagagaccttgctctatataatgtatatgaaatagacacacattatagtaccaatctcattttatatctagttttctaatgtaattcagtgtttggaaaaaaaaatctgctcttaatttctggaagaaagcaatgaccattcaactacctttctcagcaagctttccttttaaggacacctaagagcagaaaaaaaaaaccactttattattattattactttttgtttatgtatgaaatttctctaagacccagggaaaatgagcttttctgttgttgttctattgcacctgcagtaatctgggtagttgaaaactattacaatatgggcaacatttacaaaatgaatgcaaattgatattgtttaattgtttttaacttgatgaacagatttaaaattttactatgaatctataatggagtagatagtcccagtgtaaaacatactttaagtatttaaataaaggaaaaagctaaaattaaatactagaaaatacaataaaatgccatttatttgcccattttaactatgtggtttgtacaagactaaatatattaatgagagcccactttaatctatctttctctctagctctctacccagagctttactaagcaagattttatggaaatattccacaattcagcttcttactcattgtgactacctttaccaatgaatagtttagaaaagcaatgttttactccactgcagagatcccttgtactattaaaatgtggtaggtgctgagacacttatgaaaagttattcaagttgatataatcacaaaatgagactcattctctccatcagagagctaggaaaaactcctccaaaagcaatgtgccctttgaaattggggtctaaaataaagatgaatgaataattacagaaaattttttctctagagtttatatagcttattttctctccctaatcattctgtccatcaatgattaaaaatctgaagtgtcatgcaagcttcattgttctgtccttaaccgatctttttcatttgtttcacttttacattactgttttgcttttgtttaattaaacgatgctagcagcttctgttggcggggagagggggagttcatcaaaagaactatatttacactttttcacacatatgcatgaacagaaatagaaaatgagtaattagattgtatttacatatgcacacatcttgcaggcatatagtaaggggctatgttaggaaccacttgctaaaataattgttttttggggttaatttggtgacagggtcttgctcttttgccccaactggagtacagtggtgcagtctctgcctactgcagccttgacctcctgcgctcaagcaatccttctgtctcagcttcccaagtagctgggactacaggcacatgccaccacacctggctaattttgtatttttttgtagcaacttggctttgccatgtaacccaggctggtctcaaattccttacttcaagctgtctgcctgccatggcctcccaaagtgctgggattacaggcgtgagccactgtgcccagcactaaaggaaaattttaaatcactttgataatgaaattataaatagtgtcacaagcccctaatttccttatggttaattaatgctaaatggatgatacaagcagtgaaatttatagaattttttgagactccaaaagaatctcctagtatacaagtattttggaaatcatttcattaatttcttctagaattttgtatcatggtcatcaacccaatgagccaaggcatgtgtcattaatgaaattaatctaggagatgatttcactaatatggatagagatgaaatgaatagcccaaaacctcagtgtgcatgtcaccagtctgtgttagtgtgaaaggctatgcataaaggttaacactttttaatcaagagaagatatttgcaccatagaatcttctcaggcagtttcaaacttagttatttaaaatgctcccctggttatattttcttaaatctcattatgtcaccttgttcattttcatttctctttaattgctttttattttactctaataaaatgtaacaccatttattttcctcatttgaatttacaaatgcaaagtatgcagaattataattcttaattttaaatgttttacctccaattccccttaaagtgaattcacttactaagctgctgagtcattgagctgatattcagatgccctttcaaagcaggcctgaattcctggatctctccacagccgttttattacctcagccagttgaggtgtcatgccaccatcttccagggtatttgccattgcataaagttgtcgttggtcctcctagaacaatattttggtgagaataagtatgtattatttggaatcacatattctattttctaatagagtaatttactgggataattttaatcttattcttttagctaataattccaccaaacatctttttgaactatattgaggtaaatagaactaaagtttttcatggctggatgatgcccagaagagttctcctttgcaaaaactataaaatattatgtgaagaaattagcatattttgaaatatgtcactgacttctgaatatgatatcaaggaggataataatactttgctgtagtcatactaagtttgcaaaaggtctacatattataccaaggtaaaataaaaattaagctgatttaatctggtatcttcttctttttttaatcatcgccatgaatttttctagaaaaaaaaagccaagtaaaaattagagtagaccgggcatggtggctaacgcctataatcccagcacttagggaggccgaggtgggtagatcacttgagcccaggagtctgagaccagcctgggcaacatggcaaaatttttctctacaaaaaaattagtcagggatgtagtacatgtctgtagtcccagctacttgggaggctgaggtgggagaattgcttgagcttgggaggcagaggttgcagtgggcagagattgcaccactacatttcagcctaggtgacagagccagaccctgtctcaaaaaaaaaaaaaaaaaaaaattagagtaaaaatggaaataaattcattattctaaaattgtattgtttcaaaaaattaatatataatgtttttttgtcatcgggttactgcctcgtaatcatataaagaatggtaaacatttggatccacataatatttttgaacatccctgtaggcattgttgattgcatatgcctttggaacaaatcagtaggacagaggtgagagttttttatgcaaagcaaggaattattgtcttagtcctgttgggataacatttggaggttaccagcaaagaaggaaatagaagtttactgagtaaatactatagtctgcaatttatttaaacaaataatcaaaatagctttatgacaaatcattttttaaaaaattaagatgttgagtttcagaataactaaattgactgtggtaatagcccaggcaaatggagaagtctgaactcaaccttgttgtcagcctctaaaactgatatcttttttagctcataaccctcctagtgcatattattacaatttacaaaactgcacatgcaatatcacacataatcctcacaaccatgagatagacactatattttctccattttacatgtgaggaatctaaaactcagagttttagaaacgagtaaaccagtaaatacaataagtatcagaataagagtcaaatacaagcgcattttgtgccatgtcaggctgttactgttacaggaaaggggtcccaatccagatcccaagagagggttcttggatctcacacaagaaagaattcaggacgagtccatagggcaaaatgaaagcaagtttattcagaaagtgaaggaataaaagaatggctactccatatacagagcagccccgagggctgctggttgttcatttttgtggtttcttgatgatatgctaaacaaggggtggattattcatgcctccccttgttagagcatatagggtaacttcctgacattgccatggcatttgtaaactgtcatggtgctggtgggagtatagcggtgaggacaagcagaggtcactctcatggccatcttggtttgggtgggtttgggccagcttcttactgcagcctgtttatcagcaaggtcgttatgacctgcatcttgtgccgacctccttatctcaccctgtaacttagaatgccttaactgtctgggaatgaagcctagtgggtctcattctcattttcctcagctcctatttaagatgaagttgctctggttcaaatgcctctgacactaccagtgaagtatgttcaataagaacttgctgcttttctgatacaactcagcttattattattttgaattgactacagtttttttctaccattttatcaaaaatctgttctttgtataaaaaataaggatatgtcacttattgttaaagagacactggtaagggtaaaaaaagaaaataacttattctatctttcttcacaatcagcttttattgttaaaagtaaactgatcagatggtcattggtccacatattcaatgtgtaaaccaaaaacaaaattctaagtcccccaagcaacagaattctaagccccgcaaccaacagaaatccctcttggccaacagaattccaaagtaaacctgaaaaactaggtcaggctgtgataggaagggtggggtcagacatgcctcattaggccctcctccctttggaattcaggcataactcacccgcattaacattgaaacagagatcttaggactgataaaacagaatctttatagcaataagattccaaattccaaactgactccagtatagagcaggccctgaaagaaattattttacccccaaatatatttttttggcatatataaaagaataaaagaaaataacaagaaaataaaagctgtcttttgtgggggaagtttacattgtgtagagaagccccttcccttttcaaggccttttctgatcctggtgagattagctgaaagtctagcactttttaaaggtctacataggaaatatttgccatctattgcctctaagggtgccacctatgaggcttcatctacataataagaaccttggtctccacagactcttaacctagagactcctttctactgattctaggcctttagacaataacttaattctttcaaccaatcagaaaataacttaattcttttcaaccaatcagaaaatgtttgaatccacctatgactggaaggtcccgcttcaaattgtcctgcctttctggaccttgcatgtattgactgatatctgcctgtaactttaatccccatagaatgtataaaatcaggcaataacttaactaccttgggcatatgttctcaggacctcctgaggctgtgccatgggtcatggccctcacatttggctcaaaataaatctcttcaagtattttacggagtttggcttttttgtcaacaaatggccatatcaagtctcaacctgattttcctgcatcaacacaggatagatttttaaaaccccatttctctgttaaatggatatgaaagagaactgcaagttcagtgaaatatgctctggtcactttcactagcatcatgctattggctccttccactattaaagtgctgtttaggaggaatgatgccataaaacaaccactacacagttttatccctaaggagaaaaaattatatatcttgtcagcatagctttacaaaccaaacaaatatactgtttcatttctttctgtttttctttcttattttctttttcttttttctttctttttcttttttgtttttttgtttgtttgtttgtttgttttttgagacggagtcttgctctgtcatgcaggctggagtgcagtggcacaacctaggctcacttcaacctccacctcccactttcaagcgattctcctgcctcagcctcccaagtagctgagactacaggtgcacaccaccacacccagctaatttttgtaatttttttttttttttttttttttagtagggtcgaggtttcaccatgttggccaggatggtctcgatctcttgacctcatgatctgcccacctcgggctcccaaagtgctaggattacaggcgtgaaccaccatacctgtccttcctttttaaaaaaatattctatttttaatttcaatatactttatttgtagaggtatcatgaatatagttctagtttaaacacttcaatgttacaaagtctcccttgaccacttcaatcctactacctcctacaaaggcaagttatcctatcaggttggtttttgtgtctccagaccttttactttttaaatttgtgcgtgcatagttggagcctacggtaatgattttcaatccaggctgcacattacaagcatatggtgtacccttaaaagtactgatagcagaactgcaacccaaacaaaatgaatcagcatccttgcatgtcaggccctgcaaaggtagtttttaaaagcttcaaggtgacgcaactgttctgactgcattaagaatttctggcaatatacagttgttatttttttaaccataaataacactttattgaacatagtgtatttccattcttgatgttcttctgtgcttattgaaaagctggtataatttaaagaattacaattctttaaatttaaaattccttaaagcttttaaaggattgagcctacccatcaaatgtgaatttttaaaatatataacaccaaaatgtataggtattatgaaaacttagcttcctcataacggccaaactgatcgaacacttaactcctattttattgttatattttaaaaactctagtaatttctcaccaaactcaaaactcaacataaaacccaaatcccttatcccttactgtgactcacaaggttctacatgttttgatcccctctttccctcctttctccctttctctccctgccaccaagactcaagatgcactgaacaatttgttgctccttgaactcaccaagccctcatttcagcgcatttcagtggttgttgcctccatgtccttcggtggttcacttcctttttcactcaagtctcttcccaataccacctcctcaatgaagccttctctaatcatcctttctgccacatttttcaaataacaccctgtggatttgagtggcatcccaaagaagttttatttccctatgaggtatttggaaaagcttgggaattacagtgggcctggaatggctcattctctctctctctctctttaaagaatatttattttatttactcatcatttttattttactttaagttctgggatacatgtgcagaacatgaaggtttgttacataggtatacatgtgctatggtggtttcctgcacctatcaactcatcttcattctcttaagattgtgtaactttgggactacattgtatagaaaataaaatatgtgttttccctacagattactcagaacttcatcgttaatattagggatcccaggtggtcttagaactttgtggaacttattctgaaccctagagtcatatttccaaatatcatgaaaaaaatatcaaaagaaaggaagactatatagtttacctagtaattgtgagaaatgctgagttaaaaataccatgttttgtggctactcggttttcagaatctttgagtagtaatattggttgaaaatttccaagttattggacgcatatataccaaacaaatctaatcacagaacttcaattgtagaacatcttgaggaatcagtgctttttggttcatattgtagagtttactttgtagggttctatgtccaagatgattacaacagtgctcaaattatgtagtaaaagtgttacaattttcagcattcttttatgtcagttgagtggattctatatgctccaaaataggatataataatattcaaaaggataagtagatatttactaaatatcttcattatttctcctttcctatttcttcaggatatgaaggtttgttacataggtaacaaaaaaagagggtttgttaaccctcttttcaagttctatgcttaggaaattctaagcctatcaaatactaaaccacaaccaataagaacaatcccgatttagctgcttcccctctaactacatatcccatctctctcctactccttggctataggtcctgaaatattgtccttaactgttccaatagcctattctcatttctccacatattccacaggagtaggagtccaccattcttctggaacctctctcactatattcccaatggctccatatttctaaatccaatagattctatttaatagtttcctttcttgacctctcaagacctttcaatgtggataattccctttggaacacttctcttgaattctgtgatttcgcatacttctgatttccttttactcttctgtcctctcccttgaaggttcttttcctaacaaatgagcagaaaatattgtgtgttttttttttttaacactcttccctagactctgttatccctaatacccttcccttcttaatctaagtgcttccttcacctattccatcctactttcttagtatgaattatatgccatagtataatggcatgccaataacacctagatttagatctctagacaaagtgtccattttgggcttcaaatgcacatttgtaattgcttacatatgtagatatcaaatagaacttacaaactcattccaaaaccaaactaattagttcttttccatcctcatttaatgttagtgttccccttcttagtaattccttctttaagcaaggattgagctccacatatagctgcacagcctttttgaaatagcatatttgtagttacttgttaaacatcaagctctcctctcctgatgacaaatattatttccatctcagttactgctgagccctcactacatccccggtgtccaactaaatgtctaccacataaataatagtttaataaaaaataattttttcaaatgatgttggatgtatagatttcactacctaaattttaatgatcctatattcaaaataaatattgaaaaataatacctaatatttactgaaaatgtacattctataatactctgtatatagtggatttcttatgtttttgcttccttctttaatagtcattgtaactcaaggaggaaagccataacattctgtggaagcagacactgaaatttagagaggttaacttgtccaaacttatagacccagtgactaataaagctcacataaattttctatcagaacttctctctttggcaatctgtgtgatgatgtgcaaatggctatataaaagtatatgcacttgtataaataaataattgagagctaaccagaactctgaaagtcacatgtaggtagtgtttagcaatcaatctgttaaataaacaattttaaacaggtcaagagtatattaatctcaaaaccaagtactagaatgcagctgaaactgatagagttcacataagtggaaatcaaaatatgaactatgtcgtgcctgacaactgtgatgttctgatagttgagaatataggtactcttgagaagttatgacaatggctaagtgctgcttaagttgatctgtttatgccattcaatgtacagtttgaatgaactgtacttttattttttaattagcatgatggcagcaatgtgtagagtttattattttcacttcccctatatgtcaactcattaagacttttactaataaatctctcatctcacttttttttttttcaagacagggtcttgctctgttgcccaggctggagtgcagtggcgccatcacagctgctgcaacctcaacctcccaagctcaagtgaatctcccacctcagcctcccaagtagctgggactacaggtacacaccaccatgcctagctatttttttttctttttcttttcctttttttttttttttttttttttatagatacagtgtctggttatattgttcagactggtctggaactcccgggctcaagcgatcctcttgcctcagcctcccaagatgttgagattataggcatgagacaccatatctggtcaaatatcaagtatttagtgatcagagcgtcactgtttcacaaactctgggttctatgaaagacacagtctatttaaataagtagcaataggcaagattgtgatttccaacttctctgacacaaatgcatggaataccgtattgcatctacaaatttaaacatcattaaatcattctcaaaggaattcagagggtacgtctatttttgtaactattattgcctaagaggaaaaaataaatatttctaatcattaaatccttgaatagcaaaaagcactataatggaatccaggagaagtggatttttccataaacttgagctacttaatgtaaaccaactaatctttgagccttgttttttttaaattaaggtgggtatactatgttgtttcttaagagccaatttaaaatcctacgttcttaggaaaagccaaggtcagatccataactgaactacacttaaataagaacatgatcactaagtcagagagagataaagaataaaaggatcttggagttcgactcctccaagttccccttttacacatgagagggaaactgtagccagagagatagattggagcaaactgtggagaaagctagaaatgggaatcagtaaaatacctgactccttgctttataaactatctgcctgaaggccatacttagcatttccttgttctttgaagaaaagtgacaggaaaaagggggatttcccctttctttacattaagagcacagaaaaggctttgttttgttttgtttttgttttaattgtaatgatttctggtggtcatttacaagatccagtggtcatttaaaaggtccactaagctgggggagggagttcaaatgactcctctttctttatccttactatgcttttgctctctatttttattgtttctatagcaaggtttccaagaattacgttggtaggcattcaactggcatcctctggaggtaaccagatgcccagctgctcctggaggggacatatggaagtgggtgagttcttcttgtggattctactccgttactcttttttttgggtggggtcaactgtggttctttggataatactgtaagtttcatttgccaaataattttatatgtctgcctataaacttttaaagtaagtggatttcaaatataatttaatgtaaaataattagatagcaaaatataaagtagggagaaaataattttgttgctaccttacaaacggaactatgactacttgaatatacttgatatacagacatttgcttactcctacaatttgaattcttttttaaaaaaaaacttatcaagtaatcatttccctgttgccacacagaccttgtaatcatcgtcaaacattaattataattgttatgttattaaacattttttagtctctttgaaatggcataactaaaaaaattaatgtagagatattgcaaattgtgtttatgccataaattcttttgtatttagcaatcacaagcaatatttttatttgttatggtgtattatttgatattaagtttaatcctcaggaaaacaactaatgttgaataatattacagtatatagtaaaaaagtttcacttcaaggaaaataagaaatcttacacaaaacagaattaatgtttcaaaattcatgtttcatatttttaaattttggatatagattaatactatgaacttattaagtcctcttattttatggctcaaactctattgcaggacatacagctgtcattatttgcatacttactgcacttctgggatttacataatcaattccaagggtagtcatggctttcacaatagctaggatggattgcaatgtattactgtaaattactgctttgaactccatgcattcttgctcactgtaaccattcttatggatgatcctataatttaaacatgaaaagtttctgtgagttgaataattgattgtaacactaaagcacatccaactaagttgcttgaataaaattacagtatatattcattaaaaaggaattttgaccatacatatatgctaactctaaacaattttatgcctttggacttttattatcattgtcatttatacagtattttctttctgggctacccatgataaatatgaaaagacttaggatttgttatttaaaaatacttttttaaaatgggtaaatcataagcattatacttagaaagtctatttttttaagagaaaaatttctagattcccaggacaaagatatatacagagtttgaaacttgaccttgtgtttacaacctgatgtctagaggaagcgaagtcatttagaacattcatgacttttcctatcatgctgaaaaataggagtgcctgctttctatttacagcattaacaaaggcatcttttttagtacacgtaattgccctgttaaatttcttgtcagttctccatctgtgtacgtgccactgagttataaaagttgaaatgcctgacattttatttggctgaactcttctctaccttccactcattcagccaaactcaagattttactagtagttttcgaataatagcttaaaatagatttacctatcaaaagctaaaatcgttagatatgccagttacgtatttttgcatctttattgtataattttttttgttcctttctattttctcttattgtcttgaagtcctttgtattcattaggcatctttttggatgtcatattactaaagatttatattgtgtctacacgtataaaggctttagcatggggggaaaagagcataaacacctctttaatgtctttgaagatattagaagcttcctatacaagaaatctgaactgaaaggagtaaaggcacagcctatatttgttatttgttgttttttatatttgattacaaatcattgctgaacttctactttaaacatggtcatgtttgtcttgctgcattaaaccattaaataacttacataagtaaataaaatagacaaaggctgtagaaaaaaatgcagtaaaatgtctttatggatagatcaagaataagtttattaaagaaatcccagttttctgtcaaattgaacttggaaaattattattaaaatggcaactgtgaataaacatgaggcacttaggttatcttcatgaaacaagttctgattactatgagaagatgaagaaacatttatcacaaagaaaaatgataaaaacagaagttaaaatgtccagttgaagtgggactttaaacaacatcgtttttccaggagatgcatatataaatttcagtgagatagagcactccaactgcaaagttggttctgaggtctgttgaaattaataagcttttactgtgcattttctgtgacatactgtgttatgtgttaaagaaatacattatacaagtctctccttcccaaaaccatagactagagctcctctgtataatacattagtcactagatgattaattaaaattaagtaaaattaaaaatttagtttctcaatcacactatcaacatttcaagtggctactaaagccacatgtggctagcagctgccatatttcaaggcaaaatagagaactttcctatcatcccacaaagttctgttgaagaggactgagttataagaaggcagagcatataaagagatttttaaacattatgataatgcataggaacaaactctgcatatagtaagatgctatagaaaagaaaaagtgataaactctactaggtgtaaggtatcaaagaagacatcccggaagcagtgataatcagctgattgttcaaggatagttattcctagatggtcaaaaggagagagaatcattgtaggaagaaagatcagtatgagcaaatagatgctcacaattttcaagtgttcaatatgtgccaagcactattgtaagcacttcatctgtcttatttcttacaataagccctttaaagtagatacaattatgatctacattttataagtaagaaatgtcagcatagataaattaagcaaatacccccaacttattcagttagtttgtgatacacctgggccacaaacacaatctgatgtacagtccatgatcttagccatgatgctcagccttctatagtgtgttagtctacagacttataaaaggtcagcattagtgaagcaggaagtaggggagaaattacaggacaggaggatgaagacatcggcaagaactgggctccagtgtcttgtgtgccatggcaaggagattgatcttgacagcaagggtgaagagttgaattcaggagataaaatcagctttaaatggatcagttcatggcagtgtggataatgcaatgaagggaagagaagggaggtagaagctccttaggaagatactgaattaatctaggtcagaaatgatgaccaatggagatcaatgacatgtttggagacaaattgtgtagatgtggcatgacttggtaaaagggtgaaggcttagcataactatgctgagatttattgcgttgtaggctggcgttgttgtaattaattttagggcgatagaggccagatgggagataagtttaatgtttattctgatttggacctagccagagaatatagcagtagatgtatctgcctctctagtttagacaaagtgtgtgagtttgaaagaaatattctgaaacagtcagcttgaagattctggtgaaaatcatagaactctagcagttttcattttgatgaaggtgcagagtaagtagagaagtgccagcatctcctggtacagtagagacactaacattttaaatgtagtcagagatagagttagaagaataaaggagatagttagacgaaccgggaaagagttctagaagctgaagaaaagttttaagtgagaaaagtgatgtcatctggaattaacataaggacttaaggagacttcaaataaaatggctattcgaagatgacataataaataatcttcgtaagggcaacttctgcaacttaccagaggcaaaagtgtgatgaaaatggctgaaagtggaaagtaaagagagctaattttgattattttctacagaaattctactgagaaaaggaaagacaaagcagaacaggaaacttgctctttttaaataataaaagaagtgctcattgtagaaaatgtgaaaagcctaacaatattaaaaagcaaaggtgctttgaactttaaattccactattgagagaaaatttatttgaatactggtaaatgctctctcattttaaaaaagtatctatttgatcatacttgagattaaaatgttcatgcaccgggcacagtggctcatgcctgtaatcccagcactttggaaggctgaagcaggtggatcacttgaggtcaggagttcgagaccagcctggccaatgtggtgaaaccccaactctactaaaaataccaaaaaaaaaaaaaaaaaattagctgggcatggtggcaggcacctgtaatcccagctgctcagaaggctgaggcaggagaattgcttgaacctgagaggtggaggttgcagtgagccaagattgtgccactgcactccagcctaggcgacagagcgagaccctttctcaaataaataaattaaataaataaataaaataaaataaaaaataaaatgttaatgcaattttgtaacctgtttttttagtaaacatagcattttctcatattaaaaccttctcatatacatgagattaatacatgatttgtaatagttatataatattgcaattgaagaatgaatagtcctgtaactttgcaacctaattgcttatgttttattttaatttgtggcactttattctatcccatatttcattatcttaaatagtgatataagccttttatacaggcttttatattattgaattattttattttcatgcctatgcatattttattacttttgacaattctcagaaacatatttagatcaataattttcccagcttactatgtatattaaagatattatttttataaattctctgtaatatataattttacaaatagcaattaaaaatatccatttctcaaaatctcattattattgggtaattttttaaaattattgtttgtcaatttactacaatgaaaaattacctcattagtgatctgatttttaacttttataataaggttacactaaaatacattatctattgaattttgtcatttctatactctctattcatagcctatccccatttatgtatattgggaagcttattgttttacttagcaatctatgggcctttatatactagtcaccagttatttatcatatttattataaattttttcttgttctctaattttggcttaattttatttacggtttactatatttaaaagttttattttttacgcagccaaataattggtctttttttttctttatttaagctcatagagaatggagaaatgaaaaaagagaggttcaagcatgatcacagcctgggagacaagagcaggcagatactgtggaaatgttataaatgaatgccagatgacttagttgcaaggatggtcctaaaaactcaaaaatggtgcaatcccagggaacagaataaaggagctctgttcttcagagacagtaggaaagatcaggtgtttggttgcagataagtgaagcttaaatattggttgatataaaacttacatgagattatcacataaaaggaaaacagtgtcttagattgaaaccaatttcattattgactggcaggcatcactcccttataaaatatggcccaaagaacaagatcctttaacatataatttaaaaatatgctcaaaaatggtcctcctcctcttcatcctcctctttcctcctcctcctctttcctcttcctcctcctctttcctcctcctcctcctctttcctcctcctcctctttcctcctcctcctctttcctcctcctcctctttgttcctcctccttctctttcctcctcctcctcctctttcctcctccacctctttcctcctccacctctttcctcctccacctctttcctcctcctcctctttcctcctcctcctctttcctcctcctcctctttcctcctcctcctctttcctcctcctcctctttcctcctcctcctctttcctcctcctctctgcacctcctcctcctttcctcctcctccttctcttcctgctgttgttgctgctgcttctgtttcttctgcttcttcttttacttctttttagccacaattatcctttaaaattctctagcagtaacaaagccatgaggtttcacccatttacctttacttatcaattacctttttattcaggtagacactgcattcttttgtcattatttccttattaaggaattcaggtctagttatttcattataaaaaggaaaaagtagagaaacaaatgcaaaaatacatcacaattcatgatagtaattaagcattttattcccaggtaggcaaaatgctaatgaggttaaaaatactgtttcctcaaaaaatcaaatatatgattgattgacattttaaaatatttaccgttaatgatcagattataaagtccttgatatccccagattaatatgactaaaatataatgctttaagcatttgtcttattgagaggcacattttaaaaaatggaaattataatattattcatctgctacactttctgctaaaggatacaaggtatatttgcacaggaactatgaccactctatgatccatgatttagaaaagattgtcaatcagcatttacaaaagcatgtattttaagaatggtcaaatacatggacagacatcaaatattaaacacttgagacagatgtatacctacttcatttgtttaacaatagtacttttcccagattctcctgctcctgcaacataaaaagaggaatattattaactgatataccaaatttgaatagatattaaaaactatcacttttcatggataatctttaattttttttaataggtttagggggtacaagtgcagttttgttacatggataaactgcatagtggtgaagtctggtcttttagtttacccaatatctgaatagtgtgcattgtacccaacaggtaatttttttcattcctcacctccctctcatgctctcacttttccaagtctccagtgtctattattctactctttatgtccatgtgtgtgcactgtttagctcccacttataagtgagaacatacggtatttgactttctgtttctgaattgtttaacttaagatagtggtctccagttccatccatttgctggcaaagacatcaaagacatgattttttttttaatggctgagtagtattcaattatatatatcagattttctctgtccaattttccattgatggacacttaggttgattccatgactttgctattataaatagtgctgcaataaacatacaagtgcaagtgccttttaaaaataatgtttttctttgggtacatatgctgtagtgggatggctggaccaaatggtagtcctatttttaactcggagaaatatccatactattttttcatagaggttgtactgatttacatgccaccaacattgtgtaagtgttcccttttctctacatcgctgccagtatctgttgttttttgactttttaataatagccattttgacctggtgtaaggtggtctctcactgtagtttttttttttggtttgtttgtttttgttttttttgagatcgagtcccactctgtcaccaggctggagtgcagtggcgtgatctcagctcactgcgacctccacctcctgggttcaagtgattctcatgccttagcctcccgagtacctgggattacaggcgcatgccaccatgcctggctaattttttgtagtttagtagagacgggttttactacgttggctaggatggtctggatctgctgatctcgtgatctgcctgccttagcctcccaaagtgcaggattacaggtgtgagccactgcacctggccttcactgtagttttaatttacatttctctgacaattagttgtagtgaacattttcttacatgattgttagccatttgtatgtcttctttgaaaaatatctgttcatgtcctttgcccactttttgatggagctatttgcttttttctcgttgagttgtttgaattccttgtagattctgggtattagtcctttgtttgatgcatagcttgcaaatgttttctcccattctttagacgtctgtttactctgttgattatttctttttctgtgcagagcttttcgtttgtcccattggcctatttttgtttttgttacacttgcttttgaagtcttagtcacaaattctttgcctaggccaatatccagaagagtctttctttttgagatggaatctcgctctgtcacccaggctggagtgcagtggcaagatctctgctcactgcaacctttgcctcctgggttcaagcgattctcctgcctcagcctcctgagtagctgggattacaggtgtgcgccatcatgcccagttaatttttgtatttttagtagagacagggtttcaccattttggttaggctagtctcaaactcttggcctcaagtgatctgcctgcctcggcctcccaaagtgctgggattgtaggcatgagccactgcacccaacccaccctatttaaatttctaattcgactctcacccactcagtcttcatttccctattctaccttcacttctttcctaacacttttctcctaacacttttcttcttctacatgcttaggaataattcatatattatttaaaaatgttcctttcatcactgcaaagtaaatttcacgttgcaaagaatctctatctgctttgttcactgatttagccaaagcacctagaacagtgcctaactcagtagaatctcaataaaacaaatgaattctttgactcatacttcagaaatgagattttgtcctttgtactgcgcatcattttttcctcactgaaatgtttctgcatgatttacaatgttttcttaagcctcgatgaacagatatagctacacctaaatttagttctattcaggacaacttttctttttttttttttggtcatagccatatgtaaatatatctagtttctgcagttgtctgaaacagctgtccaccttatgtgatagtgaggaaataagagtggtaaagctatgggaaattatgtttcattttctggtggtgatatatagattctttcccttgggaaaacttcaagaacacacctctccatgattttatgctagttggctctccatcactgatagtgaaatatgacaacaaagttgatagatgcaaaaatcaaagtaacttgctaaaatttctttacataatcaaacacaaactgacagattgggtataaccatctcatttactagaggctgcaatgcccaagaatgaaacagttgagaataaaataaaatcatcttgcccattttccgaagacaactgaccctatcattttgcatggctgagaattgtttgtgagagtggcaactcattcaaaaatgaatgagctttgcacaatagtctggtttgctggctttaaataactcactattttgctgtaggaagtgcatcactttgggaaaagtcatacaataatattataaaactgtccttgataggttttattttaaaatctctaacaatggaactgaatattcgaaattctagcatcatcctgtacaaatgacagaatatcagaatatcttgtttctctctctatatatatacacatatacgtatatacatatacgtatatacatatacgtatatacatatacgtatatacatatacgtatatacatatacgtatatacatatacgtatatacatatacgtatatacatatacgtatatacatacatatatacacacacactgtcttaaattacagagcagtggggatgtggaagaaaagtcaatgggctcagtaggaactgcagtacttgctcatgcaggtatgtttaatgttgtattttgttcaaccaaagtattcaactagaaatgagaaaaaagtctcatttctgaatgtcagttaaatttatttaaaagatgatataatttctacaataaagtgaaaataatttagaccactttcttttaaatgaattgtctatcttgagatattgagcctaatgagaaaaagtgtgtcaatgattttctagaattgtatcagcatatgtattatagagaaatattttattgattaagaaccacttttaggcagattaaaaaatcacaaccgaattttattttattcactatatgttattgactagttgaaaatttataaatttgtgaaaaaagtgacttttagactgtgtcagttaatgtacattcagaatggtcttctgtacttcataaatatggccatttggtaatcatacagataacactaagttgtggcatttccaaaagtatttctaaggctacagggtatgttattgtataacaattatttgtaacttagctggtaattcatgctgtgtttaaggtaagcagaataatcaatcacttttttaaaaatggcatgtacttttaaatgaaactacatattaaaagttaatattttcccttgaaagcctttaaaaaggtgtctgtaccatccttgctttatgtagtgacttcagtcttctatgtaaaggtccagtatagtcaattacagcattaagaggaaaattcctaaagaaaagcctatctacttaaaatctcatttattatttggaactctattgcaaagttatttcaaaaataaattattgagccccattctcacaataattctaggtcatagttcacaatagtcatttcagtcttgtgagattagatcatgttacagagccaaatatagacattataacagcatgttcacatccgctgatggtgtcctgaaataatctcttccttccaaattgtggtcatcgctaatattagtttctgggtcaaggggtaccaagagaattttaacaagatatgcatctgtttctttgaaatagataatgttacaaataattaaatatttaaatttatacttaattcatacttagatactcataaattattttatttttaataagaataagtaaggaatcctgttctacatttttaaatctgaaaatattaaaaagaattttaaatctacccaatatttatacatgtaactgaacttcaattgaacacacacaaggcttgattgctcattttggatgacttgttcaaacaggcaaaatgagattacaacattgtgacttgtaatcacacataagatttttttttgtaggtggtcttaaaaatcacataattgtatagtagaaagaaaccttagaaatcaaccagctatgcacatctcttcagtctatgcgtgagaaaaatgaatccaatagagattatgataatcatccaaagtttcagatctgtcttcaaacaaagaaactatgtattctgactcttactaaagctgtgtcatatcgctttcttttttaagtaggcactgataaataccaaaatggtttcaacactttagaaattattttaaatgcattttttataaattagtatgagagcggtgtactttttttgttggtttgttttgagacagaatctagctctgttgccaggcttgagtgcagtagcatgatcatgactcactgcagccttggcctcctggcctcaagcaatcctcctgcctgtctcacaaactgctggaattacaagcatgagcccctacacctggccttgaaagcagtgtactttcagaggcatactggtattgctgtgtcagcttatcattcacaggtagactgttggtataaaagatttttagggtagtctcttttgagccaacttaattttgttccatgtattatttctcctttttatggagtgacatcaaaattctctgtcctttgcacatgacagcccatcacatagctggattcatcatgttttggaactaaatagatatgagcttgcactcatctctgactgtgactaagtgtcttgatcaaatttggtctcactgaaagtcagtttcctctattataaaattgggctaaaacttgggaggattagatcacaaatataaattacctagaacatacactaatatatagtgagctttaagtattttctattatttgaagaatgtgctcatatccttttaaagaaatatttcaagtataatatgatccactcctttactcctttcttgtggaacatgatttttagattatttgtcctctgaaccataccccatgtaagagccaatgtctttccgaaatgcagtactgaaaattatgctgtagataccagatttatgaacagcactgacattctgccacctagacctgcctcactcctggtgggcttgtttataaataagtaattttcttaataaagaccatgattagtttgcctccttttttttttttggcctacactcagcttgtggtaattaaagtttttctactttttttcacatctcttaccaaacagatcctcccacaaaccacgtgtatctaattgattttgaacctcaataaagatatttattaaattccattttgcttatttgcggcaagcatttctgctagtagaggttatttggaagtctgacttggttttgtcactatatccttccaaactgaatctcaagtttgaaatgcctgctttatcccccttcaccaaaatccctgataggagtattgaagagaaggtcaagggcaggaaactatgtcatactctagggtctattctgttaacaggaaacctattaatcataagtccttgttcactatctctagtgaacaatgctaaatgttggccattaggtatgatagttactgaaggtttttgtacctacagtttatctgactaaggaaattctcttctatttctactttaattggtgttttttcaatcaggaattgataaggaattttatttaattattttttggcacctcctgacattcttttgatttttctcttttaatttgataatgtagtaaataatgttaatgattttctagtagtattttaaacatgcattgttgggataatccatcttcccccaaaagtccccccaaccttttctctttttgcattttatgtattgctggcattggttggctaatatttggctttggtttttatatttatgtctgtgaggatgattgacctgccattgtctttgtcaaattttgttgtcaaagttgtcaaataataaattgaaaagaattttctaaaaatgtttatgtaattttgaaatgctctgcccatggactgtttgatagaattcccttataaagcaatatgaataaatttgcagataaatttgtacattttcttttgccaaaaaaacacattgtttatttttcccaaactttttattttgataattaatttaaaaacttacagaagttcaagaatatagtgttatggaagcccgcattttatacccttcccctttctgaattatttgtcctgtttgctttctttctcatatgtatgtatacatttacatatacatatatgaacatagttttatgttttgttttgctgaatctttattagacattttacccataaatattttgaaatgcatcttctaagaataagacaatttttctacaaaaccaaaatactatttgcatgcttaagaaaatttatattaattctaaatgttatctaatactatatactccatattcaaatttatctgattgtttcaaaaaaatgtttcccataccttttttgtttcttgtattcatgatccaatcaagtttcacactttcttttgtcgttatgctttttaagctcttttaatttataacattttccttgtaatatttttgttattttgttttgttgacattggcatttttctaaagtctaagacaattttctaaatatattcaattatctgtattctctgattagattcaatgtaaatattttagatgaatattgtataaataatgtggattttcagtttgtcatatcagtaaacatatggtgtcagatatacttatatgactacaagtacctatttctgtgatacagaaaaaataagcatcatgaatctgtaaaattcctcatcagccaaactaagtatgtttcattcatgagaaagaatattgtagctatatactatctttcctttttaatgatcttttatttagatattccaactttccattttatacttatttttaaaatatctgataatatttatagtgcctatagttaccaataatgtactggatacttaaaaattcactaagagggtagatcttatgttaagtgttcttataataatagtgacaataaataagaggacaggaaacaacttttataggtgacggagaagtctactgtgtggattgtggtgacgatttcacaggtgtatacttatctccaagctcatcaagtggcatacattaaatatgtatagcttttgcatatcaagcatatctcaataaagtggtttaaaaatgttatatgagctttcttggattgtgagaagcattttaacagatatttcatttttcttttcttattaacataccttttaggctaaaaaatgacaacactaaaatacaaaattacatgatttttcccacacaggtctgttgcagatatttgtctaagtgttcattaattgtgggaatagtcatgtatactattttttagtataaatacatattgcaacaacgatttttaaaaaggccttggttaatcacatggtttgcctatactgatatctggacaaaggaaaatataaaataaggaaaatggaggattgaatttatcaagcatgtagttcttactagagttatccctcctaattttcagacccatatgttgatctaatagatatccatttggtcctgctaaaaaaaaaaaacataggtttgaatatcctaaattatcatccctttcccttttccccagcctcatatttatcctgcatttcacataccagtgaataacataatcaaccataaccaattccaccccaatcactcctctcatttaccgtccacatgcagtctgccaccaagttctgtcactttgtctcctaacattcctcaaatcttattttcaaacttaaaatttctgcattaattcagaattgcatcaagaatttgcacaatagtaacagtttcctaattgtcctacctacctttatcctcctcattaaatctttgagccatagtatagccagggtagtctttattttttttaaaaaaagccaagtactatcattttagttacatagttaaaaaacctatcaatatcatcttattgactacagatacaaaataaaattcctatgcaataacatataaatgactttcttctagctcatttctacatgcaaaggtatacctgtgttctagccaccatgaacaaatcacaagaatattttagattctgattctgtcattcttccattcaccatacatgcattctttcctgtgccataattcaataaagaacaaaagcagatatgttctttgttctcatagaaattagaatgcagacattaacttaaaactgacacatacaaataaaaggctttgcttggctgtaaataaacatttgatatttggaaaccaaactatattcttaagttgtcattttcttcttatctatatcatgaaagtaatatctatttcataagattttctcatagattaaagcaataacagaagcagtaaagagaaaaatatgagatttatgccaatagagatagagctaaaactaaatcttgtgacaacattgacttttggacaatggagagggaatagtcataaagctaaggaggattgaaatatcaagtggatataatgggaaaggacataacaaggcacctcatggaaaacataaagatacatgggcagcaaagtaaagttgggaaattattttgagatctcccaaagtgtgatcaggtcactgacagatacaaggaatttatgaatatgggtcaacaaattgagcaaaagaaagaattttagagtcatatcagttaagttctgttatgaggtcctcaaaagagagtataagagagtacagactaaaacccaccaaggtttaagaacagaccgtggtagatgaatccacttatagatggaaagaagaagcaagcttcaatgaagagaggaatacagggatataaaattgaggactgtttagttcagacttagtttaaaagttatcgctcagggtggaggctcatgcctgtaattccagcactttgggaggccgagacaggcagatcgcttgagcccagaagtttgagatcagcctgggcaacatgctgaaactctgtctctacaaaaaataggaaaattagccaggtgtggtggcacacgcctgtagtcccaactactgtggatgctgaggtgggaggatcacttgagcccaggaagttggggctgcagtgagacgtaattgcaccactgcactccagcctgggtgaaaagaccctgtctttaaaaaaaaagagagagaaaattattgagatgtgaattttgtgaattggccattatctgcactctgtgagggataactttttactagagaagagcatatatacaacttacattgcaattaatgaaagagactaaacaggataagaaaatagaagcagtgagcatagcatcctttgagaagtatttcaatataaaaacattttaaaagatatctatataaggtgaattcaagggtgtgttgaagtcaaataaattttcttgggctaaagaagagaaacatctgtatttgccatgaagaaaaagccaatagataattttgaagatgacaaaatgaaaaataattagtggaacaaaaattttaagatatgaaaggtgatagaatttatagcacaaaggctgaaactaatctgaaatgaaaatggaatactgcttctttaaaactagtgaaaatataagaatacgtgaatgtttagtgagatttggagatgatcatttataattgttttgttgcatattagtgatcatctagggtgaggttggggggagattcaagatgaaagtgatgttggaaatgtgcgacgagctgcctttggaacattttagaagaaaatgaataagtaaaataattattggcccagctaaatttaaaacgtgatatgtgtcagccaggagactgaaaatgatacactgttttattctacaacatctgggaatgaaggaaagtaagaatttacagagggatcagggttagatcagcactaagagctgaaaaagctgttaaacagcattacattcaagaaaatcagttgggagaagtgtatcaggaaaatggtaaatggagaactctgagggattatccagggttgagggtttgaatgtcaattaaggtagaagattacggaggtgaaatactcctgaattttaggaggaacacagctgaaatgactggccctgtttaaaaggaagtagattaaatcagacaactaattcactaaatatggaaaagtatgagagataatagaatataaaattctggttagagagtgattttttaaatttatttttctttattttttgagacagagtctcactctgtgcccaggctggagtgcagtggcacaatctcggctcactgcaagctccgcctcccgggttcacgccattctcctgcctcagcctcccgagtagctgggactacaggcgcccgccaacacgcccggctaactttttatatttttattatagacggggtttcaccgtgttagccaggatggtctcgatctcctgaccttgtgatctgcccaccttggcctcccaaagtgctgggattacaggcgtgagccactgcgcctggcagagagcgatatttctagatatctttaaaaaacaattttaagtagtaaatttattctattgaaatatactgagacaggaatcaaacccatgacttcccccttttttattagcactgcatcttgtaataaacagaatggatatttttcatatcttatggattcttaaactcagttttacctttaatcctactttaggttcaaattctacattgatatatttgcacaccagtatttggagaaaaattattgaaagcaatggcaaaaactgcaattacttttgcacgaacctaataagtagggaatggattctgaacttgggtctaataccttaaacggaagtatattttattttatataaaacagatcatggaatccttacactatgaaatgtgttttgctacctttcctttctaacagtatggagaggtaaataacttgttaactgctcatgttgcttatataaatatttttaaagataaaatatttgtcttgagtcaataattcatgctcgaatgaaaatatgcgaatataaatatgttctgtaatattactagagagcttgttaaactgtagttagcaagagtcattgtcagcaagccagaattttcaacctccttagcaaatactatcatttggctaagtgtggaatgttttactaaatggtttgcatcttttacgcgagtgccttacgagcctgcttttaagatgtgctgatcaattgagataaatgcatctaaaacaatcagtcaaatatacacaaattatttgtctatgtgcttttgcttgttggaaaagagggaaattattggaaactatttgatgctgccatgggccattctgatggataaatgcaacattgtaaatatttggcaacttttctgaaaactgtaaatatcgggaactttcaagttgttgtagccctttgcattttggagaaaaatttaaactctccaagtaggtcttttctgcctaaagttttctttccacttcactgagaagcagttttaaacattcgcattaagaatattcatgcatcccaaagattggatacctctagaaacataaaataaataatttgtttatttaaattgacagagaaaatggtatgtatttgttgtgtacaacatggcattttgaaatatatatacattgtgaaattgttaaatctagctaattaacatgcattaccttgcgtagttatttttgtggtgagaacacttatccactctcaacagttttcaagaatgcaatatgatgtcattaactgtagccattatgctatataaaaatattttgtaatatttataaatatgtttaaaataaaaaggtactatagttggaggaaggaaagaatggttttaatttggataaataaggcaaaacaaaaagttggaaacattattgggaatttgttttacatgttgttaagaagattcttcttttttaccagtgatcagaaggggacttattggttaatcctaatatataattattccaaagaatgtgtttatctgatcttatccatggacaggcatggactatgttggtgtaataaaatttcaaaatagtgtttcttagagttgatgaacttgtaatctaaccagtaagtcagaaacaactctagtttcctggaatctctcccactcatatctagggataattaaaaaaaaataaagacattaaaaagcacacatagaataaaaataatcatttaaatttaacctgagtcttgagtcctcacttctcttagttacatgtaaaagaaagacaaaggaagaataatgatacacatttattgacatttgatttatttcatatttgggaatctcttatgccaaagaataaaccacgtttgtctagatctttacaagttacaaaatactttgacatccattatttctctgagtttatgtggctagcctaaggtcactctgggaagtacaaaacgcattacagttgatgaaggtattaataaatcaatttccacctcaggtgatttaaaaatgcattctgttctagtattaaattgtattctcctcattctgctgcatggttaaacctatttatctaattctgctgtgtgagttttattttactaattattttgtgacaagcctttagatagcatcaaaaatcataattctcctactacataccttccagaatatccatttgttgaataagtgaaaccatttgaaaagtttgaaaatgttaaatacaataaatatattaccttcgaagtagtttttgatctctagactccatccctattcatgtttctaaaagccagataagtggaataatagtttaaaacagtaaaactcagattacatcattaaaataataatagtgtgactcttacaatatagcacaaagaaaaaataaaaataaagggttttagaactaaaagaaaagaacatctatgatgaacttcccatgataatgctggaaatcactagctaaaagtgaaaaattgtagaataaatgttaattatatatataaatgtggcagagggtgttttgaatatgaagaaaaaagaaagctaatttttttcctatgctttccatggggcttcaaatctaagcagcccatgtgatggaaatttgcaaaaaaaacaaacgaaactgatgcagcaaaataaactcaaactgaaatttgatgtaataagcataaagagaggagaaaggaaaaatggaaacatgatccatattgagtttacaattaaataataggtattattttgaataaaagtaccattgaatgaaacgtttataaaactttaaaacgtacttagatacaaatgagaatattttatccgttagaatttgtttttcttattaaaatgtgctctttctggaatatctttgcaagtaaattttttaaagcatgtggcattattttcttgattgcagttatcaaatgtgctcagcaatgtatgagtcatctccagtgtttcctaaaagcctactttttgctaaaataaaacacagatttggcatctgttctgtaattttactgaaggtctgaaaggtgtaataaaaaaaggcatctgtctgcaagatgatcctttaattgtaaagtcgcactttgaccgctcttcagattcagtgaaatcttgtgttcgataataccaaatggttacatccgctttgcagtacatgttaaatgtggaaagttggtgttatgagtttaagcttctagaaattcattagatgaagatcaacatactgaaaaaaaatctgtcaaaagtgttttttagatttcttatttttgtaaatgtaggtattgactcaggagctgatcactactaaggttaaactggttagttccatgtgacatgtactcactgataaacttaaaagtgtcattcagacgacactgatgaatgagaacatcgtttcaatgatgggaaaaattaaatagatttcattggtgaggagatttgagggtaggagagtggaaagttttggtttagttcaactaagcacttttataatgtcttaatgaggtcaaattgaatataaaaattacagtttcgagaatttgaattcaatccaaacatgagaatgaagtagagctgttataagactgttatgaatttgataattgtatcatcatatgtagaattcagatggactccaaaagggaaacttagccagatgtttgtaatataattgaaataggaacaacttaagagaatttcatttattttgtataaataaaatgtgacaaaggagtttagtgcacatagtgttggaaccaaataaatccaagtattttacttactaatgatgaaattgtatgtataaaattgtaaacaccttgggaaagtaaaacatgtaatagtcccactaatgattcttttatacttctggtacaaatattgctctttcttcttgatctaaccaacacttaagtctaaaaataattcatctgacttatttttcatttgatagcattgcatacaataagttgggtcccagtcaatggctctgtggagtggtaaaatttactaattctggaaccctgtatgtatcagtagtccattgattttcagttccaaatttaaaaaaaatctttcttttgtccatcattacattgaacctttttgacccaattttcagtgatgtgttttcattcatctatatatactctttttgaacatttttaatttatttttttaaattgacaaataacattccatgcttgtgttgtgtccaacacgatatgttgaagtaaaaatacagtgtagaatggttaaatctagctaattaacaaatgtattacttcacagttatcatttttgtggtaagtgcacataacacctactctctttacatttttcaagaatacaatagatcatcattaactatagtcaccgtgctgaacagtagatctcttgaaatttattcttcctatttaactgtaattttgtgtcctttgaccaacaactccctttccccttgttccccccaaccaccctagcccctagaaaccacctttctaccttgttcttttccgtcacaactgaatctctagttgactggcagctctgatatgcttatctcaagagtcattgcttttggcatgtttaatagtttttgtcttagtctaaattgtggtattagctctttcattgttttggctttccatttgtatttttacaaaataagagaatatgtaaaaaaatagataattggtatattgaaaacacacatctattgaaatgttatttaaacacggaaatttttaatacgttttatcaccattcttatgtcattgatcttagtacaaaaggaatataaaaatgaatttgtaagaatgcttgtctttcccttttacctttcatttgcttttcctgtgtccatattactttcactcttgctcagaaactaacagaattctatggtgtgttaggaagcatatatttcctggtgtcattagtacttaacccacatctttcaaagtcaccaacctctgggtagttactgacaagtgctgtgggcctgtgtgcaggcacagaacctgtgtgtaaggggcaaggatgtttcctttcctttaaggagcaagtgctgggaatcccacagttggcttctgaaacactcttgccactgggagcaaattagacacaacgaaggaatacttaaataagtttaagtatttaattcatttaatattaagtatttaagtgtttaaatacttaaaatatgaggaaatttgttatgtgaaatatgcacgattctgaaataagatgaagtccttttgtgtataaccaaaatcagggagaaagtacaactcataattgaatcagaagtaagtgcttgctttgtattctttatataggtcatcatttttatttcaaaaacatatttctgtttcagtgaaactgcatgtaaaatgttttatgctttatagaaaaaatctgcatatggattatttttattctttcaattaattgaacatttattgaatttatagtcaaggtaaaacagtgctgagttttgaaagaaggaaaaaaaaataaaagagacataaatcctgacctgaatgaatatataaatgctctaaaaggatttaggtagagtatttttcaagtgtacaggcaatattgcaggcagtattcaggagcctaagtaatattgttaatataatttaaagtaccttatcattgttctctaacttgactaattgatttttaactatacaagtaaataacaaacattaacttcaacgtcaaacaattcaacctatttctgtttaaacaaaataatataactctttataacttgtagctaaaggatttctttcagtattaaaaagctgacattcagaaaatgattagggtgcaataaaataataaatgtatctgatttttattttaataatagtaaaccatattactgacagagaaattagctgataaatatttgcctccttgcttaacaaaaaggtaataaaatactaaacagaaaaattattaaatattgatagagtacaaataaattttccttaagtttccaaacacatttttataataaatttcccatatgataatacactcgaaattaaagtctgagaaaagtaaatatatcacaattgaaaaaaaagtcaggtttttgaaagcaaaagggaaaagaaattacctaatagtagcagctttacggttcttgcatctcgctcagcatcctcctgaagctttttctccagttcttttgatcttttggctgactccttgctctctgaactaattccacttcccatcttgtggtggtagatacttgtcagtttatatgttcagatttttcaaatgttgagcacagctgtggtttggacataggaggcaagagtaatgctctgctgaagtacctagcagtccattccctaatgctctaagattctgctttgactaaggagatgctttctcatctgtcacctgatcaggtggtaaaaccatacccccctgatggaggctagagaggaagttcattatgctttcaaattaaatgactgcttcgggcacatcttcgaaaacaggcttatctgctttatagtataaaataatgtagaaagttgtcaaaatctatacactagagatgatctacaataagcaattcaaatagaatgtttctcactactgggcaatttttattactgtgattaaaagttattattactaatcagcgatgcttacatcttatcttcagatatttggcccttcaatttctttataatcactcctatatcacaatcagaatatatacatgtaagttatccaacttttatggtctacctatgcttagattattacttaaagctattgagcatctattagcatctgtcagggaacaaaaaaaatcttttttttaacaatggatacaaatacatatagtttttatatttgtacatattgtattgctacaaatataaaattcaacacagttttcttaaattattgattttagtgtcataggatccatctctataaattgagcttttgccgcctgtgagaaagtcaatccatcaacactaattgagggcccacttggtgtagacactgaactatgttcaatttaggcagcgcattaactctttagggccattaagcaacagctgctgtgctggagggactcttactgatttggtaccaagggaataaaaaccaatgttctttgaaacagcaggtaatttggtttttcctacaaactaaaaacagtaattacacctaaataagttccatagctttcaactaccccaacagataccatgtacttcttgaaaatcttcaggattgagggcagagattatgttgcacaattttttatttatatgaagcataaagtgcttggtagatagtcaatcaatattttccttatgaacagagtcggttgcctgtggcacatctttcagtgtgcattttgggatttgtgaatgtgcttaaccagaaaatgccagaatacagtcaatccaccaacctgtcagtggtgctcttcttgtgggatcatgtgcaaagtttgaacaggtgagtttttacatattcatgcaacaagaaaataggctgccagattaaatacatagtcctgctttgtttactttttccacatcaaaaatattaggctgaagatacataaacatagtcaaaacttcctgggttccgttcttccaaagccatattatgatagtataaagatgtgcagtggtggataggcaaggatttgtgcaaatcatgtggtattgcttttacaatgcaaagggcctgtcccaaaggaaggagatttgcacggcctaatgctcacctgtgaacacaaagtccactctgaaagcaacacttagcacatttaatctctttttgcctagtgcttttttatagaaattgaatataatagcaccctgaataaacagaattcttgcatgttctatggcagaaacgaactgacaggctacatcatataatttgcatacaagcataaatatacctcatagctttttggcagagacgtaccctgcttttaggaacatacatgttttactaaggcttcctaatgggattactaactaaaactgaccaactctttcaggagtaggagtatacattttctgcactgtataaaacgatgaacttccacttttctgttgtaaccagtaatgttcatcaacttgatgagattatcaggtgattttttcatcagtgattaaaatattcttgacataaaactctaggtatgtctgtgttacagagagggagagcgggagagctagagaggaaagcaagactcatttctcagccttctcccctgggtgcctcggacacagcatcattaatgagctgggcttaatacagctattagttcatattgcttcacttagtcatatagctttctgtacgtaaagaaatgaggaaaatcaaaatagtaaactccgctagcgtggtgataatatcttactagcttgaatggtctacatggtatatggcacagtactagttatagtaaatgttcaaaattacttcttgctgacaaactgatagaggctggaggccctttctttcctgtgcttagtgacagtatacttaggatttcttttctaaaattttggagtgactcaaaaaaatcaacaaaaagccaaattttagttttaaatagtgtcagtatatacgattgtagctattagtccaatagtcacacatttgtttcctcagtcttaaaagtaatagcagcatcctccttttcaattgttaagccctgtttgttctacagtaagggaaaactgatagaagatgacaacagaaaaaaaaaaagctaaattagatgccgtgaccgtaaattttgtttgttcttgaaaacaagaaatgtgaagctagccaaaacaccaacatcatgttagagttttatacatgcatacatacacacacacagacatacacacatgtatgtaaggtcagtgcaaaagtaattgtgcttttggtcattttaaaagtaattacaaaaaccgcaattacttttgcaccaacttaatgtatgttccagctaggagagatggttgccctgtgtacacacacttgcacacacagacacgcacaaaaacgtgaatgcacaagcccatgcacacacacaaaaagcaagagattgtgttggagtgcagtggtcttttagaataatcattgagaatgacgtttaagaatattgtttctttattgcatcacagtaaaattgatttgaggacaaatacagagattgaaccacacttaacctccaatagtcactgaaataccacaagtatggaggatgaaaataaattttctgttgctatttttggttaggatctctgtggaatcttcagaaagcaacattagcctttaaaaagtgtgagtaatcactattttacatcgatgattaaacatatagctagaggtgacatgcaattatttgctacctgcttttaataaccagatttcaatctatgtttttggagatgtctcttttgccagtatcacctgcgtttctacggtcatcaagctgaattgctcgtggggatgttacctgtggctgacttcaatgacttgaggttgctacgtcttagggatgtctcaatggctcagctaatgctggaaattgccaaaacaggctgtgatcagtgttactctttattttgtttccaatcttataggaggttttgatttcaggcattctatccctaggtggtttgagttgtggctgccttagcaatgacctttatccttgtatattcccatgaaacttgaggcaaaccatctctcctttgctaatggtgctcaaatgtacacttcagggagctccaagcctggtatttcttccagagagttcatgccttttggggcttcctaagagcaatcttttgatcttgagggaataaagcaaaccttactctttcaagttagtacattcagatggtgcaacaagtttacattgccaacattaaacagctcttatgtactaataggtaacacaaatatgtatttttttcattggagttgatttctacctttctacattttttttatgaattaggatagaattttatatatgattattggataagagtcacaactgtttcccagggtgccttttcctatctcaaattctgtctcttttaagatttttaaaatattgctctttaacacatttctattactaactcccataatcatatttctcagcaatttcagccctgattgttgcaacagcttctcacttaggtttccttactctaggctccactctatcccagtccaatcggtctgattgtgccaggctaaattccctcaaaggcaagtttaattattactcctttctggctggaaaaaacaaatgattctatatttactacttcctcctgtgttactcctgtaacatatgttattactgagtacatgagcataccatgtactcaataatatagttagcactatctaactatccaaatatatttcccaatcacaggcagacctcaaggatactgcagattctgttccagaccaccgcaataaagtgaatatcacggtaaagtgatcacacaaatgttttagtttcccaggccatatgaaaattatgtttatactatactgtagtctattaagtgtgcaatagcactatgtctaaaaaagcaatgtgcataccttaacaaaaaaaaattgctaaaaatgctaacaatcctctgagccttcagcagtttataatcttttataaatcactgtgtaaatattaacaaaataaatgtttacagataaacaccatatattaaacatcaagaggtgcagtttcattggccattgaacatggtttcaatactttttaaaattaaagtataggaatatcgataacttggaaaacaacacaaacttgatttttacataaagcctaacaagaaaatagttactactttttgttgtccttgttatataacttcttaggagtatttatatagtagtatataaatagtaatctttttgtatatcatcagagctctgaattaccatgtgcattgtcaatttcaatatttcaaaaggaatcttttattttgagcagtaagtctcaatagagggcttaacatatttagtaaaccaggctacaaacaaatgtgctgtcatccaggctttgtttttccttttatagagcacaggcatagcagtatcagttttaaggaccctaggatttttggaatgttaaatgagcattggcttcaacttaaagtcaccagctgcattagcccttaaaaagagtgtcagcctgtccttcaaagctctgaagctggacattaacttccctctctagctttgaaagtcctaagtagcagcttcttgtaatatgactacttaatgacattgaaaatctgcatttagtgtagccatcttcatcaatgatcttagctagatcttctggataatttgccacaatttctgtatcagcacttgctgttttgctttgcacttttatcttctggaaacggcttatttcttaaatctcatgaaccaacctctgctagcttccaagttttcttctgcagctccctcacctttttcagccttcatagaattgaagagagttagagccttactctagattaggctttgtcttaaaggaatgttgtgtttgttttgatcttctatccatggccactcaaactttctccatatcagcaataagcctgtttcacttccttatcagttgtgtgttcactggagtggcactttcaatttatttcaaaacttttcctttatattcacaacttggctaactgttccaagaggcctagctttcagcttgtcatctcatcttttgacctgccttcttcactaagcttaatcatttccagattttgatttaaagtgagaggcatgtgactcttcctttcacttgaatacctacaggccattgtagggttattaattgacctaattttagtattgttttgtgtcaaggactaggaatgccgaaggagagggagagagaggggaacggccagttggtggagcagtcagaacacacacgtgcattacgtttgttgtcttatatggacactgttcatggtaccccaaagctattactatagtaataccaaagatcacataccactataatagatataacaataattgtaagtatgaaatgttgagaaagttaccaaaatatgatacacagacacaaagtgagtacatgctgttgaaaaaatgatgctgatagacttgctcaaagcagggatgacaaaaacctttaatttgttaaaaaaaaaaaactcccatatttgcaaagcacaataagtgaagcacaataaaatgagttatgcctgtacttctcataacagtctctattataggtgggcttttactctttccgaactaggagtcccattttagtttttactcattcttcttttcctcactagggatatcttgctcttccacagatgactttttttgcatagtactcattcattaagaaagaacctaccattacacttcacatctactaacatccattggctgatcttttatattttcttttcttttcttttcttttttttttttttttttttgagacagggccttgcactgtcacccaggccatagtgctggcacaatcacagctcacttacagcctcagcctcctgggttcaagtgatcctcccaccccagcctcccaagtagcttggactataggcacatgccactacacttggctaatttttaattttttaggttttgtgtgtgtgtgtgagaaaaggtattgctctgttacccaggctcagtgacacaatcataactcgctacagccttgacttcccaggctccagtgaccctcccacctcagcctcccaagtaggtggaaccacaggtgtgcaccaccatgcctggctaatttttttgtatgtttggtagagatggggttttgccatattgcccagtctgttctcaaacacctgagctcaagcaatctacccacctcagcctcctaaagtgctgggattattggcgtgagccactgcactctgcctaattttttaattttttgtagagagaatgtctcactgtattgcccaggcttctctcaaactcctgggatcctcctgccttggcctcccaagctgctgttattataggtgtgagccaccaggcccagcctgggcgattcttcacttctgagatctctctagaggaatctgctgcaattggtttgtccttcctcatcacccagacagtacactttccagtggccattctctctagttcttctcttcgatttgtgggttctaagctggtagtacataaaataaaattttgtttgttgaaatcattggtgaatggtggaagatcaatagatgtatagtattaaagagctctttactctgtattaaaattgcataattctccttcccaaatgatttcaaatatgaaattttagttctggaattttaggaatctgtttacctaacaatgttctcctgttatatgtcaggaatgagagtttcagcagtaaacaaaatagttagagacatgccctcatagagcttaatttctagtatttgtacctgtgtatgtatgtatctgtaaggttaaaatttacacagacaataagatacatctgtaaagtatatagaattatagatggtgacagttgctaagaaaaaccaaacagagaacagaggtaaggagcagggggatggagatgaagatgaaagattagaatttcacataacgtgtccagaaaaaaagctcactaaaaaaaaattgtgttagagtacgttctctgaaaactgactttaagatgaaaaacacatacaggaattttattagaaagtgttcttggaagccacccttataggtgagtgagggaagcaatatcagaagagagaggaattggatacacagcagttgcaacagagaactcagccaatcttgtggggagctctgaagctgagatagttgtacagatttatatgaaagaaagacaagaagactggactgttgtatctctttcaagaaacagaaatttaatgtatgtttgccctggaagaggataaaactgatccttttctctgagggtcatttctgagcaaggcctaagctgtgacctgtcagccaagggagtgatttcttaatcttgaagcggaactctgggcaaagtacttgggctttcacctcccgtattacttggatgcaggtaagtttagtacactcactacatctgggcatgtccaagggttgcaattactctttttcctaaggaaacttacaagaaggtgttcagtgaatcaaactacagcccttgtcaatgcttgctggtctcaaaactgcaactgttactcatcatctccctattcttcgacccatgcgaggtttccttctgctagattaacacctagggtgatcatctctccaagtttttccaggactgaaagaatccctgagacttgggacttttacttttaaaatggggacagtgctgggcaaatcagcactgggactgggactacagaatttctcaggatgtgagatttttagtgctaaatctaggaaagccatggcaaactgagaaaaggtggtcatcttactaacacttgtacttgtgtatgtggcttatctgttgagatgatgcagattctttcatgatgaattgcaggcccccgagcatcataccgttaacagtctgtggcttctgcccttgctgtttactattaaggttgagcagggaataaatcaataaacatctcatctggtcacctgggtgctgagtgtatgctggcctgatgtgattgtgtaacagcagtcagtcctgctcctaatgactagagtcaattgttcacacctagttggtgactccttaagaagcctgaagtgataaaaagacagctgtaatttacagtttaataggacccttattgtgcacctggtggaaggattgctcttctggaaaccagaactagaccccacaaagtcgaattttgtagacataggaagcacagattccccacatgggacattgggaaagatggtaagtgaggccatctctacttccatcccataattctcaggtgtgtcccttgtgaccttagggacacaagcactgtatcattttttaaaatgcatctagaatgtatattgtatcctgaggatggctttcatttgcaagctgacagattctgggtggtgccacatgaaataggacaagtagattccctggttataggtccactgttatgtctccttttctataaattgagtccattggtccaatgcaatgttatggcattctgggtcagtagatcaaatagtctataaaccccaggagagtgataaaaccagtcaaaatggatgtccgtctattccagagtagagacaaatgattggtattcttatgggattgtgctccataggggagtcagttaatttttgttgctggaaggtagaacatttggcagaggcagtaattatgtcagccttggtaagtgggaggtcatgctgtcaggctcatgcatagcctccatccctgtctccacggctacttcattcctaagcccattagtgtagcactggggatctttgtgtctgcctattggttactccaagcctcttccatgctgaatgctcattactgggtgttaacatgccatacaaaccttcagcaggttcattcactctcttcctcagacctctttgtccctcatcttctagtcatttcatttccaggacccagagcatccagccaattcattcacagctatccatacatatatttttacattgtattcttttttaaattcttttttttaagacagggtcttgctctgtggcccggcctggagtgcagtggcacaatcacaactgttgcagcctcaagctcctgggctcaagctaccacccccccgccccccaccccccacgcttggcctcccgagtagttaggactgcaggtgtgcatcaccacacttggctaatttttaaattttttgttagagatggggtcttgctatgttaatcaggctggtcttgaattccaggtctcaagtgatcctcctgccttggcttcccaaagtgatggaactacaggcatgagccaccacccaggcccattttgttttaagagtaatttatcttttcacacaaagtggataaccaggtttatttaccacagctccactcattggaaggctttctttttcacaggtgactttcagttacacccaaagaaggcaaatgacagagcagctgtatcattattgtttatacttgtctatcaagctgagccacctgtgagcttagcttggcttttttcctccttcattacctggctataaatgtcagctaagggaggagcattggtgactatgccacttgattattcagattacttgtgcctgctggccgtgcttgggccaaatgccgggtataatactctgactgaacaatggatttctgttaagcacacccaagtttatgatttggtaggtcttatgaaacctatctcttgatgagtagctctgatcacatggtcacctgatgtcctattttccaacagtccaattccaccaaagctcagtagcgtgaaaatagtgcttccaaatggtatatatttctgctatagatggcattactttgttccctatggttctgtcttatgtttctccaattgagctttccattaattctacaaggcaccttttctcactgtagacaactataatataattgttttcaactgcaggtgattttgccctccagagctcatttatgaatgtctagagacatttttggttggcacaagtgggaaaaaggggttgctatcagcatctagtgtcatctgctaaatattctacaaagcacaggacactccaccccaccccctcacccctgtgccacatacaacaaagaattatctgacctgaaatgtcaatagtactgaggttaagaaacccagctctagtactgtaaatctattgggacatagtcgctcatatagcagaacttctcatatgacttcctaaacttgctgaaatccctttgttgttctggaagccttttgcgtcactttatcaataaggtggagctggaatatgccgtctttataacccaaggaaatttacaagtggtgtttcattaggtacaagagtcaataatttgttctttatttcagacaaaggccctggcgtgtttcatactactggactcctagaaactctgctgatctggcaaggccttgaatctctttagggcttttgaccatcttctagagttaatgtgtcttaacaaggtttccaaatatatttgtcacttcttgctcatcttttcttattaacataatgttatcaatacagtggatctatacaatgtgctgagaaatgttaagacagttcaggactctttggaatatttatgacagagtatgagaatgttaatacaaatcaggacaagtccataaatgcttacagccatttatctcacatgaatacaactatttctgtttctccttccagataggaatggaaaaaaagattttcacgaaatcagtggccacacactatgtacttgaggttttgttaatttgctctagcaaagataccacaatgggcaaagcaactgcaattaatgttactacttaactccacttgtagcagtactttgtcaactgccaggatctgtttggcttgtacagctagtctcctaaattaaataagatatgatggggtccactattcctgagtccttcatatatttatgctgacaacaatgtgtgccatttcctctatggtgcaacataggtttcatttattttactggatggtgtattagtctgctgaagttgccgtaaaaaaataccacacactgggtgacttaaacagcagaaatttctttttctcacaggtctggaaactaaaagtaagagacaaaggtagcggtgggttgatttttggtgaaacctcttcctgacctgtagatggcttccattttatagactggctacccttggcctcctaatgattactcttgatgcttctgattgtttatattgagcaatactcatgtaagaagctcatttattttgctccaagaacactgatcatttctactgatcatgtccataggtctctgcaagtccggatctcctggctgctgctctgactttgactttcattaccacattgtatttacttcagttatcataattaaatgctagcacctggcctctattgtttggggatcttattatccccatgctttgaaaggatgcttagctgtcgagaaacactttcatcaagtagtgtagtttcaagcacatttttaaaattattttttctttcctcctttcccccagtctcaagatgtaaccttgaaacaaactttaaaaatatttttccttagtcttaaaatatagccttgaaatgtactgtgaaactgcactcctgtcactttcccacatacactcctttatcccatgcacatttatcgaactgtgtgtttgttaaacttacacaatgcacacatctaactatacgtttaagaaattccaggggctaacttaaaacaaaccaggcatgaaggcccagctgcggaattctcctccatgtaaagattggctcaagttggataatctacagctcggtagctgtcaggatgatgccaggccgcactccaggtgggcaataactcaaaataggcattggagcaaaacagacagcccctatactctacacaacttctgcatgcctcccatgtcaagcttctccttttttaatccctgtcctcagcccaaacttttgaaatgatttttttgttatctttttttttttttttttttttgagatggagtctcgctctgtcaccaggctggagtgccgtggctcaatcttctctcattgcaacctcctcctcctgggttcaagcaatttttgtgccttggcctcccaagtagctgagattacaggcacgtgccaccaaacccagctaatttttgtatttttagtagaaatggggtttcaccaggttggccaggatggtctcaacctctgatccgtacgcctcagcctcccaaagtgctaggattacaggtgagagccaccgcgcccggcctgaaacgatttctttaagacaagagacttgaccattttcccactgctagctcaagaataaaatcactttccttccactgcacttccttcttgttcactggcttggcaagcggcaagcggcaagcggtggaacctgccttcagctacaagaagaggtctgttactgttttttctattatcaaccctggctgaaatccctctcactagtgaattccttttaaatttcagtacacataaagctttctggcaacttcttgaagtctgatttattttccagccttatgtattaatattattctttctaatatgtcaactctgagtcttttgccaccttcctctgccgtttgtcataggacaacactatattcaggcttccaagagtcttcgtagaaaacattaatgctatctctcagggtgttgaatctgatacaaaaaaagggtttctctctgatatgtcttctttatccaactttatgtgttatcttcctttaattcagcactcttagaacacagtatctttcctgaaatttcacactggctagcttctgcagctcttttggtatatggtggtccatggtctctttcttctgttagcaggtccagaacttgcctgactaggtatggtgtaagtagattacagttattaacttgttctccagaaggagaagaaaacatagatccccactaaggtttaaggtgcatgttatcttatgagacaagagcctgggcattggcttcatgcaagagggattgctagcctttaaaaaggaagtatgccacatcttccagcccaaagggtccaggggaatttaagaattcaagatcttttgatgcatcagcccaggcatccttattctaaatctcaaggtcccactccttcccagtgaagaccttgatcttgttgtagtagatttaaaaagcttgaaaattcagtcctctctggaacttgctatctttctcattaagtcctgcacctaatcattgtgttttcaagccatttctccactccaggagataaatgcttgtttttatgcagccaaaaagtccctctggcttttacactttacattaaattagtgactaaccaccattggccttccgttgtctttctctagtggattggtagttctcagcaaatagccatcagtgctatagttctttttttttttgtctattgatttttctttatatatatttttattttttttattatactttaagttctagggtacatgtgcacaacgtgcaggtttgttacatatgtatacatgtgccatgttggtgtgctgcacccgttaactcgtcagttacattaggtatatctcctaatgctatccctccccaccatggaatactatgcagtgctatagttcttaaaatttccactttccctacacctctcaaactgtgaaatttgacccatcattgcctcttactcagatcacattttaggtcactatcaatgaaagtttaaaaaattgttctgctactgcaaatcaggaactacaagtaacacacctacaagtagtaatggggtcctaattgcccagctggttgagaggtggggttcgggctggataatctggtttcaatatccctttctagagtctgcatcctaggaccactcctggcaccaactctctttgattaggcttcctggaaacagagtctagggcagatatttgcataaagtgggagagtgataagatacgccatcggcagatatacctgtatagaatgaaaaaggcaggcagcagaaacagttgaactacagtggaggtacaagagagtcctctgctgattctaaagggagtctatagctgggaaaactcttcagagctaaaactgaaaggagcgtgaaccctcatgctcccattatccgagtcattggatgtggctgccctcagttataaccttggccagggaagtcctttcggttaaggacaatttctggaaggaaactcagctgttaatacttccagtagctgtaagaatgagtgtcttagtcatgaaaggggttttaggtggtatagcagaatattaactccagtaacatttgggcaaagacattaaagaaattaggaaatgaaaaacacagacatcaggagaaagacaaatctgagccaagaaaataataattgcaaagtctgtgaggcaggcacttgcctagtgtatttggagaactgcaagggaatctgggtgtctggggtagagtgggtatgggaagagtagtacacgaggaaggtggaggctgggtgcagtggctcacgcctataatcccagcactttgggaaggcgatgcggatggatcacttggtcaggagtttagaccagcctggccaacgtggtgaaacctaatttctactaaaagtacaaaaaaagaaaaaaaatttagccaggcatagaggtgggcgcctgtaatcccagctatttgggaggctgaagctggagaatctctggaacccgggaggtggaggctgcagtgagctgagatcatgccactgcactccatcatgggcaacagagcaagactgcatgaaagaaaagaaaagagaaaagaaggagggaagggagggagggtgagaggaaggaagggaggaagggaggaaggaaggaaggaagggaggaagggagggagggagggagcattagtgggcacaggtgtgggctgtccagatcactgagggactcttagattaggtcaggactatggcttttctctgtgagagactgaaaaccattgcagggttttgaggagtggagtaaactgatatgaacatgttgaagatatactgaagtgatctagggcagaaatagaaaaattagaaaaaatttgcaataatccaggtgaaggcaacatgatgtaggctagatgatcacgatgttaagaaatggtgagatttttggtacatttgacaggtagaactggcaggatttgctaaaagatgtgatgtggggtttgagcaaaagaaaggagcctgagtaatggtaaggaagaatgtgctatatattggggtggaaggaggctagatagcagcaagatggtggagtaggacttccagtgcttacccctctgcagaatcatcaatttgaataactatccatgaatgaacatgccttcgcaacagctagagaaaccaggtagaaaggttacagcacctgggtatagcacagaaataagaaaaggcacatcaaagagattaggaaacagttttacattactcattactacctctctcctaaccccaggctgcatagagtggagagagataccctccgcatgggagaagagaaaagcaagcaaaaggctttgctttggacccccaaattaggctcatgtcagtaaaatttagcactggccagtcccccaccgccatccaggctggtaccctcagaccaagcctccaggtccattcaatcaccaggctgatcccatcagccccagcaccaggccagtacctgcagtcctagttgtaacctgctatacagtctccaggcctccctagcatcaggtctcgccctgtagcctcaagctccaggcccacctcagcctccataccaacccagaacaaagtcagctcacatagctccaggtttcaggcccacttcagggccaggttgacttgacacccccggttggtctcagtcaccaggccagcactcataggctccaggcctgcccagtgccaggccagctcctgtagccccaccctccaggctagcccctgtggccccacgttcaagcaaacctaaggtttaggcctgttccagtaggtattagcactgagctggctcccaggaagtcaggctctaagactacccctgtagtcccagatttcaggccactctcacaaccccagacccaggcaagccatcacaaacctagcctccaggccagtacccacacagccaccttccaatctggccctcacaggtctagctccagacaggtctcaaaggccccagactccaggctggcactcatggtctcaggcctccaactggcctctatcaactcagactgtatacccgccccagcaccaggctggcctcaggttccagtggatccaatgtccagacctgctccagtagaccaaggatctggtccaccccactagactctagggtcaggccagcccccatggactgaacttccatgaccacccttacagagccagcctccaagccagcccctgtggattcaggctcatgtcttaccctggtgccaggtcagcccctgtaaacccaggcttcaggccaatctccgtagaacctggcaggcccactcacctgctgaaccaatcaactaagattccagcagtaagcctgaccacagactacatactacatgacttccccagaatctctggataggatcactggtgaaggattttcccagacaaagccagtctgcaaagactaaaaatgttcctacttcttcaaatatgcagacaccaatgcacagacacaaggatcgagaaaaatcagggaaacatggcacaaacgaacaaaagaaatcaccagtaactaaccctaaagacatagatatttatgtctatgtctaccgccttaaagaaattcaaaacaattgagatgggaaagactgtagcgagcagatttggaggagaaaaactgctatagtttgaacgtgtcccccaaaagtctatgtattggaaacaatccctctgcttccaaaacaagctctctctggctcccttgctcttattctctcacatgtgatgctatctgccatgttatcatgcagcaagaaggctctcaccagacgttgatgccatgctcttggaatttctggtttgagaatcacgagctaaataaacatattttctttttaaattacttggtttgtggtattcagttatagcaacagacagtggactaaggcagaaaatcaagacctcaattttgaatataatatgtttgaaataattactagccaaattaagtgttcaagcaggccatctcacatatgagactagagttcggaatcatggctagaatgtaattttggagtcatcagcaattgatggactttaaaactacaaaaggagctgagataatcaagagattatgtaaaactagaaaagaaaagaattccaaagactgtgtccaagataacttaaaggagcttaagaagttgcagctaatatgaatattaaaaagtcaggagaatgtactcttttcctagaagccaagtaatgaaaaggttttaagagaagggagtgattcagtctgtcaaatactggtgaatggtcaattaaaaaatatattgaaaattaattcttgaaaccagccagacctataacattttcagctggagtatcacttgagggacatgtactacatttcaaaatatttgttattaatcaagctaacagactattaatgaaatatattttttcctcttacttagaaaaagtaacttcataatgctgtaaagagccatgctgaaatttagcactctttgacttttagagctctatgctgaagtgtggaactgcaaaaatcctggcccattcttcccccataggaattgctaacagcagctgtttgcaggagattagcaaacttgcttgtataagagttccatcatggcaaagcacagaattgataggaggagaaaggggctcttggcctactgtttgagctggaacatcagtcttttcctgctctcagtaatcctagttcttagaccttcagactctgtcaagaatctacatcattggctttctggttctcatgcctacagactacgtcaacagtttttctgggtctcctccttgcaggcaacagattgtagggcttcttagtctccagaattgagtgactcaatactcaacaatacatctaagaacttatgtcaatgtatttaaattatgtatatatacatttatcacccatactaattaataaactgtagagtttggaaccagaaaaatctgaattatactcctggttacatcattagttataagtggcttagtgaatactagcaccatgctatgcttcaaatgtgccaccacctgaattcaggtttggccaatgggatagtattaagaggcaggtcctttatgaggttgatatggtttggcttagtgtccccacccaaatctcattttgtagctcccataattcccacgtgttgtaggagggacccagtgggagatgattgaatcatggggttgggtcttccccatgccgttctcgtaattgttgatgggtctcatgagatccgatggttttaaaaaccggagtctccctgtacaaactctccctttgcttgctgccatccacgtaagatgtgacttgtttctccttgccttccactatgactgtgaggccttcccagccatgtggaactgtgagtccaattaaacttctttcttttgtaaattacgaggtctcaggtatgtctttatcagcagtgtgaaaatagactaatacagtaagttggtaccagtagagtggggtgttgctgaaaaaaagacacccaaaaatgtggaagtgtctttggaactgggtaacaggcagaggttggaagggtttggggtgctcagaaaaagacaggaaaatgtaggaaagtttggaatttcctagagacttgttgaatgactttgcccaaaatgttgatagtgatatggacaataaagtgcaggctgagggagtctcagatggagatgagaaacttgttgggaactggagcaaaggtgactcttgttatgtcttagcaaagagactggtggcattttgccctggccctagagatttgtggaactttgaacttgagagggatgatttagagtatctggtggaagaaatttctaagcagcaatgcattcaaggagtgacttcggtgctcttaaaggcattcagttttataagggaagcagagcataaaagtttggaaaatgtgtagcctgacaatgcaatagaaaagaaaattccattttctgaggagaaatccaagctggctacagaaatctgcataagtaacaaggagccgaatgttaatccccaagacaatgaggaaaaggtctccagggaatgttagaggtcttcacagcagccccttctatcatagacccagaggcctaggaaaaaatatgtggttttgggggccggacccagggtagggtctccatactgtgggcagcctagggacttggtgccctgcatcccaactgttctagctgtggctgaaaggggccaacatagagctcgggccacggcttcagaggttgcaagccccaaaccttggcagcttccatgtggtgttgagcctgccagtgcacagaagtcaagaattgaggtttgggaacctccactcatatttcagaagatgtatgaagatgcctggatgcccagggagaagttttctgcaggggcagggccctaatggagaacctctgctaggacagtgcaaaagggaaatgtggggtcagagaccccacatggagtccctactggggcactgcctagtggagctgtgagaagaggaccaccgtcctccagtccccagagtggtagattcactggcagcttgcaccatgtgcctggaggaagagctgcagacactcaatgccagcctatgaaagcagctgggaggaaggctgtaccctgaaagccacaggggcagagctgcccaagagcatgggaacctatctcttgcatcagtgtgacctggatgtgagacatggagtcaaacgagatcactttggagctttaagatgtgactgccccgctggattttggactggcagggggcctgtatcccctttgctttggccaatttctcccatttggaatgtgtgtctttacccaatacctgtacccccactgtatctaggaaataactaacttacttttgattgtacaggctcataggcggaaggacttgccttgtctcagataagattttggactgtggacttttgagttaatgctgaaatgagttgagactttgggcaactgctaggaaggcgtgattggttttgaaatgtgaagatatgagatttgggaggggccagggtggaatgatatggtttggctctgtgtccccacccaaatctcatcttgtagctcccataattcccatgtgttttgggagggagccaatggcagacaattgaatcatgggggtgggtctttcccatgctagtctcatgacagtgaatgagtctcatgagatcttatggttttaaaaacaggagtctccttgcacaagctctctttttgcctagtgccatccacataaaatgtgacttgttcccccttgtcctccccagtcatgtggaacggtgagtccaagaaacctctttcttttgtaaattgccagtcttgggtatgtctttatcagtagcatgaaaatagaataatacagtgttggggtgatgagacccaacaccaggtcgtgggggcgatgaagtccagcagagtcaaaggattgagaaaaagacagtttgagaagtaaagtgggaccgggggccatcgcgattgtggaggctgcgaaggcccttagctctgggagcccacactatttactggtaatccaacaaagaaacaggttgtaagaatgtggaggtcaaaagggcaggtgcatgatctacagctgtgatggtttagcatttatatggaacatgttctgctacttgagataatgggaatacaatcgatctcagagcctaggagggctagaagcaaggagccagcaagtccagacacattccagaggacattatgtcagacaggcaagccctgcctcagtatttttccccaacactcagcttttccccaacaatacagaggtgattaggcaatgaggtctcctctctggtaaatgggattaaggcccttaaaaaagaggcttcatgcacctttcacttttccttccaccttctgccaagtgaggacacaatggtcctcctctctaaaggacgcagccctcaccaaacaaccaaacctactggcaccttgatcttggtcttgccaggcttcagagttgtgagaaaatacatttctgttatttataattccctggtgtgtggtattttgctatagcagcacaaatggagtaagtcagtccatttacatttgatcctttcatgaatttctgtaggcaataagatggagagaatattgtcaggagacatagttcatacttctgccagcaatactgaggatgtttgaattgcaggacaaccatatttgccaaaaagtagtattaagaaattcagttactggttatgatatggagaaatgaatgctcttaaaatatttggtggaaatctaaattgttttaggtaaattgactctgtcaacttcaattaatattgattttaacataaagaaacaaaaatacggccgggtacagtggttcaagcctgtaatcccagcactttgggaggccgaggcgggtggatcacgaggtcaggagattgagaccatcgtggctaacacggtgaaaccccgtctctactaaaaatacaaaaaattagtcgggcatggtggcgggtgcgtagtcccagctacttgggaggctgaggcaggagaatggcatgaccctgggaggcagagcttgcagtgagctgagattgtgccactgcactccagtctagcctgggcaacagagtgagtctccgtctcaaaaaaaaaaaaaaagaaacaaaatactggcatatattagtttgctagaacttccataacaaaatactacagactgggtagctgaaacaatggggatttattttcttacagttctggagcctggacatccaagttcaaggtgttgggagtttggatttcttctgagacttccatccatggcttgcagatagctgctttcttgctgtgtcctcacatggtctttcctctgtacccatccctggatatactattttcttggttattatgtaatcttgtgaaaatttttactttccttccttataaaattagagacttacaaagctcttttgaatattagaaactcttagcatggttcctggaagaccaatatagagcagcatttatgatttttccagttgaagaaagatacatatcctgagatctggaggcaggaatttccacagacataggtgagattgagagacagtgtggtgaattaccatgaacaggtcagtttgatttgagaattgtgtgtgtagaagagcaataaaagacaaatacatatttaaaaactgattcaaataggattgtggctggcatcaaattccaaggtaagggattatggtacaggttggaaggagctaatagatatttttgagtaaggaaatggccaagtagaagcagcattttaagaaaaaaatatacctgtgccatactatataggttgacagaaaagaaaataaaaataaagaatcaagtaagagtcctattacaatatttaaaacattagaaaataaggatgagaattagggtactgaactgaatatggggaagtaattttaaaatgtccaaatactagaaataatatcaagaaaaagataataatagatgcttgatgggaaaagaacatggaatgaaaatttggtgctgtgaaaggaacactatttttggagtcagagagtcttgggctcaaattgtgtcttccctagttttgtgcctttaatcatatactcagctcatctgtaaaacaaaagtaatcatgccagtgagtttgctatggtcttgtaatataataaaatagtaaggcctctcttttgttctaaattgggataatgttaacgtaaatgaacaagattgggggtaaagggaaacacatttgaaatacaaaataataagactaacacttatttgtttgatttgatatgatggcaggatctccataagaaagcatataataggcatttgaaaattcatgactaatactcaagggagagatcattattttattttaaaaatgaagtatgttttaagtatggggagagaattaaggctcagatgacaccaaagttcaaggtatataaatatggaattcttcatctttaagttcaaaccaagatgaactctatttagatcatggtaatagtttttctagctagctgctctcacttttcctattcagtctccataatatggctaagtatattttcctatgccccctttaaaaacctccatagttttggaggttgacattctcatctctctgctatatgactctaatacaccctcctcgtcctatatcttatcacatttctgttatgttctttgctgttccaggcaaaatctcccaggacttttgaattatttatcaaaacatactctttgtcctaaaatgtgaaatgtcatcataaatctcatgcattttcaggatatcagagtgtatttattttaaaattgaaaatttgtgcgatgtaaaatagaacattccttctaggtgtgcatggatctagcagtcaattaaatttatatcttgttatttgttgaatcaaacaatttgagtcagatgcaaaatatgtaagaatcagattgaccttcctttgttttagcttcaagaagtagtgcaaacccaaccttttcctataatgggcaacaatgaaccattgggagaatgtagagaaagtctttgttatcttccatggagtttgcttagtatgggcaactgacattactgcacaacaattggcttttattttacctaaaaccaatccctttaaagagagagttaccttaatgtgaagtgagcaaaatcattatttgcatcattctaccttacttttaagagttcatttcttctctctcggcacattccttcttaaaactcagaggcctcccagaacttcccattttcaaaatacacttcatcgaaactcttccactagacaaagcaccataactcagacctattctatatctgaagaaggaagttatcaaagctttcttagtaagcataatggggtgatagacagaactttctgggcttaagttttcttaactacacatgatgatatcaaaatctattgtcacaagtgagtgaactggcacatggcagttgttcaaaattttattcttccttgtcctgtgacaaaaagagttgtcccgatagcacctgcctacataattaatgatgattatatctccaacacagttcttttatattgcgtagcctaatgacaggtttgttagactttcccatcagtatcctgttatggatgctgtgcccagccagacaagactggacttaccctccctagttgctagaatgctaacagcagagagttgtcatttctctctagaaatttctctcggccaaaaatgtctaccttacccatggtcacacacttctatgagggatagcctatgtctaatgaccggtgcctcaaattgggataaatctgaaggctcatcccagcttcagagctcagtgtggagttggctgagactttgttactactgcactgaagcccatttgcagcccttctctgtgtaattctgccactgtcacttccccaacaggtgttgaccctaagcttccttcatgttagcttgttttagagtcagcttcccacagaaccacatcagaaacatactttaagccaagtatgtccaaagcagacaaccaccaccaccaccactaccacctccagcaaacctgttcacaccgcattttatgagttaaattgtactgtctttgactcaattgcccaatgtatcctattcattttcactttgttcccacattcaaggaaacagtctttccatttttaactctataatttctctccagcctaaggctcatttccattcatatttctcctgcttttgttcagacagttcatccctgacttactctagtaacatattaactggtttcatattttcttatacttcctgttcagtatgtttaaaatatattattatcgattcacatggagtatttaacacacagtgatttcaccaaagccacatggacacacttgtgatttacaataattttgaggacagattattagattgtctgttcaaaggatcaccatttcctccacacacacaaaaattaaggtattgagaaatataaacttttaaataaccttagataaattccccaatgatgttgtattcccagaaaccaaagtcatttgtgttgttattattctttccactcggcagtgaatgggttaaagatcactttctaaaagcaagtcttgctaaaaattagagcagaaggccatgaggacttagaagcatgtaaaggatatggaaaggaggacaccaaatgggagcaattgggcagaaaaataaactggtgtcataactgacaacagtaaatgtccagtttattgagaagtggccttcctaccactcattttcttctgaaactaattgatcttatttattgttacactcttctcatcatcttccttcactatgacactccttaagtgtccttggagaaaaatacatctatggttttgcttgcattaacagttttccaagtaactcacaagtgaagaatatcataagttaactggacatgttcagacacataccttggggaagacacacacacacacacacacacacacacacacacacacagtcattcatgcaggctgcaatatcgaaagcttgcttgacttggctactcaatttaatcagcagcagtttgccttattacttattgcattatccacctcttgcctaacttccagtctcttttcaggtcaccatcccagagcttcttgtagagttggctgagaccttgttagaattctccatacgtatcctgttgtgacactaacaggaagttctaacaccacactccctctctagtcacactaagcatcttaacctcacagatatacattttttctctgccctctaggatactgcacaaactgttccctatgccttgtacttcctcactgccttaaactcccccaatttggacagctctttctaatctttcaagtggcaactttgacgtcttatcctcttaaaacaaaaattttaaaaccctctctactaccctagactagatcaaatattctgttatgttttcccctaaaactcttggcttaccatgctaataacattcattaatacatataattgagtaatttcgtttttaactcttcaaacttaggctccaaaaggactagaaatgttattcaccattgtagtggtggatcttgacataatgcctgacatatcagagacattcaaaattttttgaaagaatgagtggtttctgtattgaaatgagtattctttttgctctcttgaaaaaataaaattgttgctttgaatgtggttaaacatagttctaagatatgaacattaattttttggaatgtttttctcttgaaattattgatttaatagaattgtatggctctgcatctgtcaaaatagaaccagtcatacttgcattaacaaacaatgccaaaactcagtgacttgaaataatgatttatttcttgctcactgctatagtctaaatatttatgtaccccaaattgtatatgttgaaacttaatccccaaagcaagagtatttggagttggagcctcgggaggtatttaggtcacgagggcggagccttcatgaatggccttagtgtccctacaaaagagcctccaaggtgattctttgcccctattactaggtgaagacacagcaagaaggcttcttttggccgggcgcggtggctcacgcctgtaatcccagcactttgggaggccgaggcgggcggatcacgaggtcaggagatcgagaccatcccggataaaacggtgaaaccccatctctactaaaaaaaatacaaaaaattagccgggcgtagtggggggcgcctgtagtcccagctacttgggaggctgaggcaggacaatggcgtgaacccgggaggcggagcttgcagtgagccgagatcccgccactgcactccagcctgggcgacagagcgagactccgtctcaaaaaaaaaaaaaaaaaaaagaaggcttcttttacaaggaagtggccttatcagacaccaaatccactcgtgccttgatcttggggtcaccagcttccagaactgtgaggattaaatatttgttgtttataaatctaccagtttttggtgttttttataacaaccagaatggattaagacacattatatgtgaatacaattacacggagagtattcatagaataggacagaatgctgatgatagagttttgggggaatatttaaaaagtaaataaaaattatctgtatttaagtgtaattacatgataatcatttatatcagtttctcgtccacagaaatgcatttatatataccgttacatgaacaaaagtaaataattgggtgtttcagaatatttagatatccaagctattgccattaatgaaattcttctataaaactaagtaatttatcttttgcattatttaactattttctcaaaagaagtgattatttatttaaatttccagtgatcctctagaataaacccgtataaaaggatatagtctttttatgtatatgcattagtgaaaatggaaatctttctcacaggaggctttgatgacagtttgtaaattgcttgcaagttactacatttatttcaggtttcatgttttagattagtcctagtaaaattctaagaccttatttatttttttgaaatatctcgttattaccagttttttccagatatttgtggaatttttgtcttcctaactgatgtgctagtattctctagattatttctcacaaatacagataaagtcttactttgagaactttattgttaatgcttttaactactgagaatgcagattatggcattgtgttaaatgacaatataaattatctccgactattgctcaacttctttctagtttagccattgactttcttcttctgtaagcaatattctcaaggcaggaccaattctgctaatgagtagaataggcagattgatgcatatctgatagaatttaagtgatttcaaatttctcctcagactcgtcccagtgtctcacattcctacattagctatacttttaaaaattaactattttggtacttttataaagttaactcattaaataaatttgtttatttggtttcgctatgttattggtttctctgtgttgttcccctgtttttactattcatttctcagaattttaaagaacagtgtcacattgttgagctattttaaaactgtaaatagaaaggaaaggaagagagagacttcagtcccaggccaaaaactattagcacagctgaaatcaatcactgtctttcttgttccataggaattactactcaagggaccttcagaaagggtcaaggaaagctatttttcttcccacgacttggaaatacatcttctttcctatgatgaaagggatgtggtgtgtgtgtatatatatgtattttttttttcagaattctatcgtatctattttattttatatatatatatatatatatgtatccctcattcttactcctcatttcattcacttattttagcatcttccaataattcatctttctaattgataaaaagtaaaagatggtagaagtcactctattccattaaaattattgccacactgcttgagcaagattatatgtctccagaattgaactgaggacttcctgagtagagtgattctattttttaaaaagctttcatagtacctggcacatcaaggccttcaataagtcttattagagtaacgaatggacatatgaattgatgagaatactttaaaacattacataattgttaaagagatttctgaaagtcatagaaaatctattcttttgagtggttttaaagatttaaaattgatttcccaataaatggatggttcaaaatactcagataaattcacaggactgttgtgagtaatcaaaaaggtaacaattaataaaaatgaacaataagcaacagaaataaataatttttaagtaataaatgttttaatataggttaacaaagtatttctctgtgaaagacactagatgctcaataaatgaactacactttaaaaaaatgttttccaagatcttctcaacaaacaagccatgatataccaactataaaggacagataatctgctgaccaattccatcaagcaaatcacatccacatcagtcaaagtaggccataatgggggcaccaaaaatctcacgtggggagattaatcacactttatgggaggcttttgtgtataaaggttaatttgaggtcgtcttttctgaagggacatcacagtagcttcacagttatatgactaatgagttttgcttttattcctctgtccagttacttctttaacatgactatatctagtcttaactgtcctcaattcatcaactctggggcccttaaacacggttgaaattatctttgtaaacaaatgcaaaaaatatttatgaacatgttctttcgcctttcttcaaaggcattaaaaacccttacggtgcagactagtactagatctctaagacaaaaacgcaaaggaatcacgtgaaagataatatttaattaaaatttcagttttgtttaggacaccaaaggattccaaaaccttaagctaattcaccctcaatcagtgatttagtcattcttatataaatagttgtagacagatgagaataaaaatgattctatttttgctaaatttgcttgaaatttttgcagagaaatcccaagttgttcatttatgtccttttgaatactccttaccataaattttcttgcattttattttcttattaggcaatgggcatgcagagcacaatacttgggcattattggactgataagaatctgtaaaacattttctttccttgatgaaatctgcaatttgcctatagcctgatttccttaaggcttttgcctattgactcatctttgacaaccagccaaaaggaatttcaagacaaacacaaagtgaagagtcacagtcagctttttctacactcttgggaaagcctttctcggtacaaagttattcttgatttcatttagctaaaaatcccagctaaaatccatagaaaaatgtatggaatgggaaatttgggggtttggggttataaattttttgaaacccattacatcttcctaaggctgtaatttctgttagaacctatcctttctgtacttccttctccctcccactggattccaagagtcttctttctttcctacttctcaaaaaacaaactatggaagtcaggccacttacctggaagatccttctgaacagaaaacatgtttaattttaattttaacttttttttttttgatactgggtcttgctctgtcacctaggctggagtgcagtggcacactcacagctcactgcagccttgatctcctgggctcaagtgatcttcccacctcagcctccctagtagctgggactacagggttacaccaccacaaccagctaatttttatattttttgtagagacaggattacccagccatgttgcccaggatggtcacgaactcctgggctcaagtgatccatctgcctcggcctcccaaagtgctggaactaaaacaatgagctgccatgcccatcctgacatggtcttaaaaaagatttaaaatattttttaaacctttatctcctctagagtccctaaggaataggagatccttaaaacatatttattggctatctgactgcattcctaattaaaggtccatatcagtgagaaaataaatgaatacatgaacatatttattgctacagataattttctaccttgccctctcttatattatttccagttattttaagaaaacagtcacagtaattagctatttgcttattcttcactgtattttaaattaaaaaaaattcttaacagtattttaatttataacttaataatacttgttaatttaaatgccttaaattgacaactaggtaaaaaaaaaagttaccaaaacactggggattttgtctaggtcctgctgctcaccacacagaaaaccagtcactgagacaatgagtattgtcagggaagaaggctttaattgggtgctgtggctgaggagatgggaggtcagtctcaaatccatctccctcactgactaaaattagaggtttatatagcagggaagacatgaaaccatgtgtgggaaaatggaaattagagatggacaaggcagagaaattggtcaacaggcagcagggtggtgcagtcatgttgggtgaggagtctggcgtctctttgtctaggtgcagtgatctggtaagtttcagctccatggtataatctgggaggcctgatagctggtttcctgagaaggtaactcaggtaagacaaatgtaactctcaagttgtaagactgggaggattaatttctatgtttactccaagaaattataaacatcagttctatggaacagttggtctagtttcaaaacctagtgtgctctcataaatatttgaaaccaacattgttttctttttctctcttttttctcctttcctttgtgctttggaaatattatgctgaaagaaaacacaatttatttaagtcgaggaagtagttttcatagagagtagagtacagtttcttatgattcttcatctgctcctataaggctttcaagaaggaacatccagaaattgtaagccttaaacaattgagcaatgctttattttgctttctgtctcatagaaggtctacagattcagttataataagaaggaattaaatcataggtaattgatatggtttggctctgtgtccccaatcaaatctcatcttgtagctctcataatccccacttgttgtgggagggacccagtgggagatgattgaatcatggaggcaggtctttcctatgctactcttatgatggtgattgggtcccatgagatctgatggtggttttaaaaacaggagtttctctgcacaagctctctcttcacctgttgccatccatgtaagatgtgacagtcctccttgccttccaccatgattgtgaggcctccccagccacatggaactgtaagttcaataaacctctttcttttgtaaattgcccagtctcaggtatgtctttatcagcaccatgaaaatggactaatatagtaaattggcaccagtagagtggggcatggctgaaaagatatccaaaaatgtggaagcaacttcagaactgggtaacaggcagtggttggaacagtttggagggctcaggaaaatgtgggaaaatttggaacttcctagagacttagtgaatggctttgacaaaaatgttaatagtgatatgaacaataaggtccaggctgaggtggtctcaggtggagatgatgaacttgtttggaactggaacaaaggtgactcttgttatgtcttagcaaagagactgctgacattttttgcctgccctagggatttgtggaactttcaacttgaatgagatgatttagagaatctggtggaaaaaatttctaagcagcacagcattcaagaggtgacttgggtgctcttaaaggcattcagtttcaaaagggaaacacagcataaaagtttggagaatttgctgcctgacagtgcaacagaaaagaaaatcccattttctgaggagaaattcaagccagctgcaaaaatttgcataagtaatgaggagccaaatattaatccttaagacaatgggggaaatgtctctgcattgtgtacagcctagggacttggtgctctgcatcccagctgctccagccatgactgaaaggggccaatgtggagctcgggctatggcttcagagggtgcaagcctcaagccttggcagcttccacatggtgttgagcctgcgagtgcacagaagtcaagaattgaggtttgggaacctctgcctagatttcagaagaaccaagaaaatacctaaatgcccaggtagaagtttgctctaggggtggggtcctcatggagaatctctgctaaggcagtgcagaagagaaaggtggagtgggaggccccacacagagtccctactggggcactgcctagtggagctgtgagaagagggccactatcctactgaccctagaatggtagatccactgacagcttgcaccatgggcctggaaaagccacagacactcaacatcagcttgtgaaggcagctgggagggcggctgtaccctgcaaagccacagagccagaactgtccaagactttgagatcctacctcttgcattagcgtgacctggatgtgagacatggaatcaaaggaaatcattttggagctttaagatttgactgctctgctggatttcatacttgcatggggcctgtagccctttgttttggccagtttctcccatctggaatggctgtatttactcaatttctgtacccccattgtatctatctaggaagtaactaagttgcttttgattttacaggctcataggcggaagggacttgccttgtctcatatgaaactttggactgtggacttttgagttaacgctgaaatgaggtgagactttggaggactgttgagaaggcatgattggctttgaaacgtgaagatatgagatttgggaggggccagagatgaaatgatatggtttggctctgtgtccccacccaaatctcatcttgtagctcccataattcccaagtgttgtgggagggacccagtgagagatgattgaatcataagggtgggtctttcccatgctgttcttgtaatagtgattgggtctcatgaaatctgatgtttttaaaaacgggagtttctctgaacagtctctctctttgcctgcctccatccacgtaagatatgacttggtcctccttgccttcggcaatgattgtgtggcctccccagccacgtagaactgtaagtccaataaacctctttcttttgtaaatttcccagtctcaggtatgtctttatcagcaccgtgaaaatggactactacagtaaatacacttgtcaggggtaccaattttaaaatatgaaacctggaggatataatgttaagtgaaataagcaaggcacaaaaagacaaataccacattatctcactcatatgtagaatctgaaaaagttgatgtcatataagcaaagggtagaatggtgttaccaagggctggggcagttgaggaaaggggtctgggaagatgttggtcaaaggatataaaagtacagttagatgggaggaataagttcaagagctctattgtacaatatagtgatactattatgtattacaatatgattagtaatatatagaactcttgaaaaatgctaagagagtggataggtgttcttactacaaaatatataactatgtgaatgaattcatatgttaattagctagatttagtcatttcacaatgtaaatacaccttgaaacatgttgtacatgataaatacatacgattttatctgacaatttgtaaaaattgacaaaagtgataaaagaaataaacaaaatagaactataagaactatactataaggagaatgaacaaaatggaaataaagatattgtgaagtaaggtattaaaattaatggtataaatatctgagaaaagcctggaagtttatgaaatatgtggaaaaatagaagcttgaaattttatgcctaggagatatttagagattatgtaaaagtacatataaacatttttatgtcatggatcaaaaatctggatatttttctcaaataaaccatcaaatttagggccaagacaaaattagaatccaggttttcctacttcaagtctagtggaagatcactttaaaaagatctttcaggccattaacataagctctctgactacagagattttgtagtcaccttcattgtggtatctctagagtctagaactagacctgacccctggattcggcactcaactaatgttagcgagatacatgaatgggcaataaatacattaattcattaagacctaatttttgaagggtttgtgataaagctcacatgttaaataatcaaggtccaggttatgaaagccctataatatgtgatgttattctctttaaatacttgtaaaattttagtaactagattgaaatatatgttaactattgatattttaatgtttgagatatgaaaatgacagtttcttgtttcaacttaaaaatcactgatataactttaacaacaaataattctaagaatgtgaagacaataataatgctatatcattttagaaaaataatctataagccatactattgatgtctgataatggccaaagggttcttttatttgattaggctgggtagtttagcatatgaatcatcctgagagcttgttaaaatagagatttctgaatccctaccaattaagattctggcctagaaaatcaagtctaattccttggcctggcattcaggtcccttgtatcaggtcttggctttcctatccagcaccatctcctcaccagcctgctctgtccccttctctcccaatcatacatttttgcattcttaaatctcttaattctatctgaaatgccataccagtttgtcaaattaatagacttataagccctttcttcataaatttattatttatttattatccatctcccccactagctagtaaaaccctctgtagcagtaccattgcactggcatttaccaagaccctggtacatttttctggtaagtagaatgtgaccaataattatttgtaatatgcataattgaatggcatttgtccactttgtttagtataaagccaagtaatataaatatgaaatagaaatacatattctatgcagaggaactgcagagagtatatttgttctacaagaatgaggggtagttttaggaaaggtgttattgaattggtaacaagtcaggcttgagtttgtgactgaaggctagggattttgtccagaagcaattactcactaaggttcttagttttagctttctctcattcttactctcaaattggtacatgtcataaatatttttttcattaacttcccaactattaatgttggtaactatctaccccttatcattgtacaaaagctcatttttattttcttaagtggtagttctgtctgttcacttgttcctttaacacaactagtttactgtgatgagtcttgttctctttcataatgaattcctattagttatccataattatcccagaatctgtgctcagtataagagggagttgtcttttggaagcatcccagaacctttgacttgcaatttataacatttacttagtgacacaaaagaaaacaaacaaaaggacatttttgaataaccccagaaactttccccattaatatctaattttagattatatcagttcctgctattggaggtcttggaggctgccagttcacatagtgttttcaaatttacagcacaaggcaatgagaacatatgggaccaaagttctgtttttcatattctccattttaacctttccctttgaaatttaatcaacatgaaaggaaataaacactttttgtcttccttgtacaatgggagtgatatcctcctccatttccccagtgatagtcaggttccagatagctgcctttaatggcaaagtttaaatcacattgactcctatgagcaatttggcaagtatttttaccaagcacaggacaactgctagagccaaatggctaaatacttctctaaggctaatcatagaattcacaattcaactttggagtaaaacagctgtgtcaaagaactatttgacatttcacctgcaatgtaacccagaagaaaaaattaattacacacagaagactgaaattcgtggagcattgtttagatatcaaaaactgggatttgcatttcagaatattttctgaacaattatgagcatgttaaattggaaagggaagtcaacagagaattgtaagaaatccactaatttttctgagctgtttctcctgcttcctgggagataaaggacttctgaaaatctacacgtctcaaaaagtttactcatttctttgatttgttaaaaaaaccaaaaatcattaaatatctattgttccattccgattttgtgtgaaatggtattgcctagatatttactccctagagtgtttacacttaagggctctacattttattgacatcaaaattaaaaacaaatgttttcattctttaaccttagaggggaaaaactatgctaaatctaagagaaggaagttttacctttctatgattctattcttttagtgagtaatgtcttttgagtctctgttttttttttcaaggaagactttatcaatttacatcaattcctagttcaataagtcttaaggcagatataattattgttttccttaattatttgttgagatattttcattctatccaaatgttttgtcagtcgtcacattctctttccaaataatttcagcaattagattattgcatcatttaagaaacttttcttccctatataatgtaaaatacagagacattattttaagtagcaattgttcttatttattgagaccacttgtgtataaggtaccatgctaagaactttggatacgctatcctcaactcagtgttttctcatgtaaaaaggggataatagaggtgtttacctcactattttgttgtgtgaaataaagcattttgaacaatactgaccatatagtgatttctatgcattaaatattacttaaaattatacatcaatatattacttaatagaattgtcctatgaggtaggtaattcttaacatttaaatattgaggaaattgaagctaagcagtttaagtaatttgctcaattttacaaagtaagtagaggagccaaaattagaattcatgtctctctaactccaaagcccaagtttgtaatctgcatctccttttgcttcagtattctccaccccacataccttctcccggcatatgcacaacatgaatgtgaggaagacactacacctccacacatgaagcacttgtctgaattatgctccacacatgggatgtttcattccattttgtgttagtggatgctactcctcttttcaagtctcacttctgtttcaggtttgttgctttctgactctcctgctccattctccttcccattgtgtctttcatctgcaagcttagaggaagaaggatactcttttaaagtaaagccatccagtctctcctagtgaaaaccagaaagttttccctctacaacttcataggcatggcacagtgcttgcttcatgtagtctcaaaaccccttcttaatttagtttgcaattttaagagaggttaggaatatctcaaatggctcttaaaagatttatatctttttaaggctttcttaagctactgtgtaaatttatatcgaagaaaagagacactaaaacatttttagtgaatctggtgctcagaatcaagcaacacatgatcactattgaggaagaaggcctcattcctccacaggacagctggcagaaaagcatttcatttcactgcttgatgcatcacataaactttataaaagtaaaaccagggccgggagcaggtggctcaagcctgtaatcccagcactttgggaggccgaggcgggcggatcacgaggtcaggagatcgagaccatcctggctaacacggtgaaacctcgtctctactaaaaatacaaaaaaaaaaaaaaaaaaaaaattagccgggcgtggtggcgggcgcctgggaggatgaggcaggagaatggcgtgaacccgggaggcggagcttgcagtgagccgagatcgcgccactgcactccagcctggttgacagagcaagactcggtctcaaaaaaaaaagagtaaaaccaggcagaaaggtgtaatttgtaggcaaaaccccacaaatcagggagagatttttttgtaaaacctcgtttgagtattaattttcatcttcgatgttatagaaatatttgctatctaggtcaagagaactttctgcatctttaacgaacagctgaacaactgtaaacatgtaattactgggataaaaatcaagaggaaaagtcactctgctacttcctgcctttcaattaggaatatagaaagaccttctgtttatcttcctgttctcttagaattagccttcatcccactggcccagagataacctttcctgataataagtttttccaacaagaataattcagtaacaatttctcctataaggactgagttgctatgaaatgggggctactggtattgacatttctcaagatactactctaaaatgcttactttcaatagtttaatgctttaaatatgctaaataatctatcaggacatataacttatagttataatgtataagacatccagaaatcaatatggttccataatataggaagaggtctgttttttactgctgtcaccaactctgggtcacaaatccctgaatgatttcatcatgtcaagctgacagtgtggctaacttgggactaattcaaggagtcaattatttcttcagggtgactgaacacttagtttgacataagcattttgtagaacttaggaatagttttcatgcaaacaaaagtacaaaaataaagttctaattcaacttccaagtatttctcccatggtaacttttatttatgagaccaaatgtattcttagatagcttagtaattcatctaaacactacttttcctatgcatccatgtctcttctgttcagtcaatttccacaactccaataaaaacctttttattttgctcaatttaccaaattttatgaccttcaattctctgcatatgactcagagtcctatgacatgcacgtttaaacatgtgatctatgtggctttggagtttgaggatatataaatgttgattccacttggctgaaaactcatattcaaatctcagtagatactttttggataacaaagtaatctgctagggaataatgctaattgacaaatttttttcaattctctagaaaattatcagtaatttgtaagaatttttcattttcctttccaattttttcacttgtttctcatgtcgaaacatattttctgatagtgttatatttttgcttttgctgttgactaatttttttgtttgttcgtttgtttttgagacggagtcctgctctgtcgccaggctggagcgcagtggcgcaatctcggctcactgcaacattcgtctcccaggttcaagtgattctcctgcctcagcctcccgagtagctgggactacaggtgccccccaccatgcccggctaattttttgtatttttagtagagacggggtttcaccatgttggccaggatggtctcgatctcttgacctcatgttccacccacctcagcctcccaaagtgctgggattacaggcatgagtcaccacacctggcctgtttactgatgtttttatttagcttcactaatgcttttttttttcttttcattattttattttatttctatttcaatagctttaggggttttgtttacatgggttaattgtatagtggtgaagtttgaaattttagtgcatcccttacctaaatagtatacattgtacccaatatatcattttgtatccctcatcccgctccccctttcccctcttctgagtctccaatgtccattataccactttgtatgcctttgtgtactcatagcttagctcccacttataagtgagaacatacagtatttagttttccattcctgagttacttcacttagaataatgacctccagtcccattcaagttgctgcaaaagacattattttatttttattttatggctaaatagtattccacaatgtatataaaccacattgtctttatccattcatcaattgatgggcacttaggttagttccatatctttgcagttgtgaattgtcctgtgataacatatgcatgcaggtgtcttttttatgtaatgaattcttttccatacccagtactaggattgatggaccaaatggtagatgatatggtttggctctgtgtccccacacagatctcatctcaaattgtaatccccacatgtcaagggagggacctggtggaggtgattggatcatggagggcgtgttactccttgctgttctcctgatagtgagttctcgcaagatctggtggtttaaaagtgtggcaccttctttctctctctcctgttgctgtgtaagatgtgccttgcttcgccttcgccttctgaaatgattgtaagtttcctgagggctccccagttatgcagaactgtgagtccactaaacctctttcctttataaattacccagtctcaggtatttctttacagcagtgtgaaaatggactaatacagtagatctgtttttagttctttgagaaatctccatactgttttccatagagattgtactaatttacattcgtaacagcagtgtataagcattcccttttgaccacacataggccaatatctactgttttttgactttttaatgcgattctggctgtagtaaggtgatatctcatattggttttaatgtgcatttccctgatgttttgtaatgtcaagtattttttcatgtttgttgaccatttgaaattcttcttttgagaactgtctattcatgtatttggccactttttaatgagactttttgctttttttcttgctaatttgtttgagttccttgtaaatgctagatattggtccgttgtcagatgcatagtttagaaatattgtctcccattgtgtgggttgtctgtttactctgatgatcatttattttgttgtgcagaggctttttagtttgagtaggtcccatttatttatttatttttggttttgttgcatttgcttttgaggtctcaggcataaattctttgcctagtctaatgtccagaagcattttttctaggttttcttctagaatttttatggtttcaggtattagatttaagtctttactccatctttatttgatttctgtatttggtgagaaataggaatccagttttgttcttctacgtgtggctatccagttttcccagtaccttttatagactaggatgtcctttctcccatttaggtttctgtatgccttgttgaagatcggttagttgtaagtatttggctttatttctgtgttttctattctgtttcattgatctatgtctccacttttacacaagtactatgctgttttggtaattatagccttgtagtatcatttgaagtcaggtactgtgatgcctccagatttgttctttgtgcttagaattgctttggttattcaggctctttgttggttccatattgattttaagattgttttatctgattgtgtgaaaaatgatgtcagtattttggtaggaattacactgaatatgtagattgctttgggtggtatgatcatttttatgatattgatttttccaatccatgagcatggggtgcatttctattggtttgtttcatctatgatttttttcagctgtgtttagtagctctccttatacaggtttattacaaccttggttaagtatattcctaggtatcttttgcagctattgttaaaatgattgagttcttgatttgattctcagcttggtcattactggtgtccactgattttgtaacaatagactttacagaattcatttatcaaatctaggacttttttggaggagtcttcagcgttttctaggtatacaaccatataatcagtaaacagagacagtttaagacttcctcttttccaatttggatgccttttatttctttctcttgcctgatttttctgcctaggacttccagtaccatgttgaatagaagtggtaaaagtgggcatccttgtcttgtttcagttattagggggaatgctttcaacttttccccattcagtgtgatgttggttgtaggtttgtcatacatggcttttattatttttgaggtatataatttgtatggctagttttttgagggttttttaatcataaagggatactggatttcatcaaatgctttttctacatccatgaagtttgtcatatagattttctttttaattctgcttatgtgatgaatcacatatattgatttatgtatgttgaaatatccctgcatctctgggatgatagccacttggatcatggtgattctttttgatgtgctgttggattcagtttgctagtattttgttgaggagttttgcatctatgttcatcagagatatttgtctgtagttttcttttttttgttatgtcatttcctggatttggtatcatgatgatactggcttcatagaatgagttagggaggactccctctttctcaatcttttggaatagtttcaatcgattggtatcaattcttctttgaatgtctgctaaaaatcagctgtgaatcaggccttctttttttggtaagtgttctatcactgattgaatctcactgtttgtaactgatctgttcaggatttctatttctccctgtatcaaactaggagggccatatgtatccaggaatttatttatttcctctagattttctagtttgtgtgcacagaggtgtttatagtattttcaaatgattttttgtatttctgtgctgtcagttgtaatgtctcctttttttttctaattgagcttatttgaatcttctctcttcttggttaatttagttaatgatcttttaactttgtttcctcatcttcaaagaaccaactctttgtttcattacctttgtatgttttttctttcaatttcatgaagttctgctctgatctttgttatttcatttcttctgctagctttagatttggtttcttcttgtttctctagttcttgaggtgtgatattagttgtcaatttgtgatctttcagacttcttgatgtaggcatttagcactctaaacttctctcttagcgctgcttttgctgtatcccagatgttttgataatttgtatcactgttattcattcaaataatttttcaatttctatcttgatttcattgttaacccaaaaatcatttaagagcagattgtttaatttccatgtatttgtatagctttgaggattctttctgaaattgatctctagttttatttcactgtggtctgagaagacccttgatatgattttgatttttaaaaatgtattgagacttgtttttgtggcctgtcatatggtgtgtcctggagaatgttctatgtgctgatgaaacaaatgtaaactcttcagttattgggcagaatgttctgtatataactgttaggtccatttgttctagagtgaagtttaaatccagtgtagctttgttgactttctgccttgatgatctgtctagtgatgtcagtggagtgttcaagacctcactatttttttttatttgacaaattccttttacattttatttgaaagaatgaaagaccaggaataaacaaactattactgaagaatatcaaagtagagagatatgcccacacaaatcaagatctcatagaaaacaatagtaattaggatagtggagtcttgacatagtgataaataagtcaaaaaagaaaatagagaatcaatgtttttaatttactaaattatgtcatggtatatgtaacatttgataattactattaaacattgtgtttttgagacttactcatgttgatacatttagatgtagttaatggatttaatctatatagtatgccatcttgtgaacagaccttaatttttccagtcatcccatgatgttcctttaggttggtctcacttttccacttacacaatagcttgatgaaccttcttgttctttatgcacagacatgaagtcatgtcaaaaataatgtctgtaggtaagatatatttttcttcaaaattataaagtagtactaaggtgttttacaaaggaattacagtaatttgcattctgatgagagttcatcttaacttataccttcaccaattttgtattttgaagatttttcattcttggctgcttcatggaataaacgtatattttatttttgctttaattttatttatcgggttacaaatgcaattgagtataactatcaattattcagaatcccccttagtgaattaccttattgctaccttttgcccttttttctatcttccctgaatgcatatccttcttgtctctctgtttttttttcatttttattataaaataatcagatgtaattttattttttctaacacataaaatccatgatttttttaacttttaattttaggggatatatgtgcaggtttgttacataggtaaacttgcatcatgggggtttgttgtacagattatttcatcagccaggtattaagcctagtatccataacttattttacctgatcctctccctcctcccacccttcacacttcgataggccctatgtgtgtttttcccttctgtgtgtctgtgttttctcatcatttagcttatacttataagtgggaacatgtggtatttggttttctgttcccactttaatttgctaaggataatggtctccagctctacccatgtccctgcaaaggacatgatcttgttctttttcatgactgcatagtattccatggtgtattatgtaccactgtttttttaatccagtctatcattgatgagcacttaagttcatttcatgtttttgctattgcgaatagtgtttcagtgaacatacacgtgcatgtgtctttataatagaatgatttatattcttttgggtatatacccagtaatatgattgctgggtcaaattatatttttgtctttaggtctttgaggcatcactatgctgtcattcacaatggttgaactaacttacactcccaccaacagtgtataatcattacttcttctctaaaactttgccaccatctgttgtgttttgactttttaataacagccattctgactagcatgagatgatatctcattgtggttttgatttgcattttttcatgattattggccacatgtatgtcttattttgaaaattgcctgttcatgtcatttgcccactttttaattttgtggtttcttttttcttataaatttaagttccttatagatgctgaatattaatattagacgtttgtcagatgcatagtttgcaaaaattttctcccagtctgtaggttgtctgtttattctgttggtcatttcttttgctgtgcagaagctctttagtttaattagatcacatttgtcattttttgcttttgttgcaattgcttttggtgtctttgttatgaaatctttgcccatgcccatgttctgaatggtattgtctaggctgttttccaaggtttttatagttgtgggttttacatttaagtatttaatccatcttgagttgatttctatatatggtgcataaaaggggtccagtttcaatcttctgcatatggctagccagttatctcagcaccatttattgaatagggaatcctttccccagtgcttgttttttgtcacatttgtcaaagatcagacagttgtaggtgtgcaatcttatttctgggttctctattttattccattggactatgtgtctgttttgtaccagtaccatgctgttttggttactgtagacctgtagtatagtttgaagttgggtagcatgatgctaccaactttgttctttttgcttaggattgctttggttattcaggctttatttctccatatgaattttaaaatagctttttctagttctgtgaagaatgccaattgtagtttataggcatagtactgaatctataaatcactttaggaagtatggccattttaataatattaattcttcctatccatgagcatggaatgtttttccatttgtttttgtcatccctgatttctttgagcagtggtttgtagttcttgttgtagagatctttcacgtccctagttgttctaggtattttatttttttgtgtgtggcagttgtgactgggagttcattcctgatatgcctctcagcttgactgatttggtgtatagaaatgctaatgatttttgcacattgattttgtatcctgagatattgctgaagttgcttatcagcttaagaagattttgggctgagactatgggtttttctagatataggatcaatgtcatctgcaaacagagatagtttgacttcctctcttcctattcggatggcctttgttttttctgttgcctgattgccctggccagaacttccaatactattttgaataggagtggtgagagaggacatccttgtcttgtgacaattttcaaggggaatgcttccagtttttgccccttcagtataatgttggctgtggccttgtcatatattgctgttattattttgaggtatgttcctttaataccaagtttattgagagtttttaacatgaatagctgttgacttttatcaaaagtcttttccacatcttttgagacaatcaggtggtttttgtcttcagttctgtttctgtgatgaatcacatttattgatttgtgtatgttgaaccaaccttgcatcccagggataaagcctacttgattgtgttagataagctttttgatgtgcagctggattcagtttgaagcactttgttgaggatttttgcattgatgtttattaaggatattggcctgaagttttctttctttgttgtatctccgacagctcttggtttcaggatgatgctggcctcacagaatgaggtagggagaagtccttcctcctcaattttttggaatagtctcagtaaaaatggtatcatctcttctttgtacatctgaatgtatcagctgtgaatccatctgttcctcagctttttttggttggtaggttatttattcatagcactttattgttctgttcaaggattcagtttcttcctggttccatcttaggaggatggatatgcccaagaatttatctatttattttaaattttctagcttatatgcatagaagtgttcctaatattctctgatggctgtttgtatttccatggggtcagtggtaatatcccccatgttgtttctgattgtgcttatttgaatcttctctattttcttcttttgttagtctagttagcagtctattttattcatttttgcaccaaaaaaacagctcctggattcattgatcttttgaatggtgttttttttttgtctctatcttcttcagtttaactctgattttggttattttttgtctcctgctagctttgggatatgtttgttcatggttctctagttgttttagttgtgatgttagattgttaacttgagatctttctaactttttgatgtgggcatttagtactataaatttccctcttaacactgccttagctgtgtcccagagattctagtatgttgtatctttgttctcatttgtttcaaagagcttcttgatttctgtctttatttcattatttacctaaaagtcattcagaattaactgggtgtggtgacacatgcctgtaatcccagctgctcaggaggctgagtcaggagaattgcttgaacccaggaggtggaggttacagtgagctgagattgcactactgaactccagcctggggaacagagcgagaccctgtctcaaagaaacaaacaaacaaacaaaaacaaaagtcattcaaaaacaggtcatttgattttcatgtaattgtatggttttgagtgaatgtcttagtcttgatttctaatttgattgtgctgtccaagagactgtttgttatgacttcagttcttttacatatgttgaggagtgttttattctgacaatgtgattgattttaaagtatgtgccactggcaatgagaagaatgtatattctgctgtttttgggtggtgagttctgtgtgtccataggtccatttgatccagagctgagttcatgtcctgaatatctttgttaattttctctctcaatgaagtgtctaatattgtcagtggggtgttaaactctcccactattattaggtggaagtttaagtttctgtgatggtctctaagaacttgctttatgtatctgggtgctcctgtgtgctcctgtgtgggaacatatatatatatttaggatatatatttaggatatatatttagaacatatatatttaggatatatattcaggatagttaggttttcttgctgaattgaaccctctacaattacataatgcccttgtcttttttttttactcttttttggtttaaagtctgttttgtcagaaactaggattgcaaccctgcttttttctgtttttcatttgcttggtagatttttctccatccctttattttgaacctatgtatgtcattgcatgtgagatgggtctcttgaagacagcataccaatgggtcttggttctttattcagcttgccactttgtgtcttttaattaggacatttagcccatttatatttaaggttattattgatatgtgtggatttgaacctgtcataatgatgttagctggttatttttcagagttgtttatgtggttgctttatagtgtcactggtctttgtacttcagtgtgtttttctagtggctggtaaaggtctttcctttccataattagtgcttccttcaggagctcttgcagggcaggcctggtggtgacgaactccctccgcatttgcttgcctgaaaaggatcttatttcttcttcaattatgaagattagtttggccacatgaaattctggattgaaatttcttttctttaagaatgttgaatattagcccccaatctcttctggcttgtagggttcaactgagaggtctgctgttagtctgacaggcttaccttagtaggtgacctggcctttctctctagctgccttttaacattttttctttcattttgaccttggagaatctgatgactatgtgtcttggggatgatcttctgatggagtatcttactggggatctctccatttcctgaatttgaaagttggtctttctagctatgttggggaagttctcatggatgatatcctaaaatacgttttccaggttggttctgttcttcccatctctttcaggtacaccaatcagtcataggcttagcctctttgcatgatcccatatgtcttggaggttttgttcatttttttttccactctttttccctcttcttgtctgcctgtcttatttcagaaggacagtcttcaagctctgagattctttcctctgcttgttctattctgctattaataattgtgattgcattatgaaattcttgtagtgtgttttttcagctctgtcagactgcttattttcttctctatactggctatttgtctgtcagctcctgcaatgttttattttatctttcacttccttgcactggattatagtgtacttctgtagctcagtgaactttgttcctatccatgttctgaattctacttctgtcatttcagccatctgagcctcagccaaattttgaaccctcactggagaggtgatgcagtcatttggaggaaaggaggcactctagctttattagttttcagcattcttgtgctgattatttctcatctctgtgggcttatctaccttcaaactttgaggttgctgacctttggatgggtttttttttcttttatcttatctgatgaccttgagggtttgattgtgatataaggtggattcagctaactggcttcatttctggaggattttagggagtgaactttcagctcccaactcctggactgcatgctgtaattctgggggacttgtattgagccccgactttgttttctggctccttgaggtttgaagtttactatgccagggggaccaaggtgaccaaggtgcagcagccacaaccaagtgttagtgggtataggggtgcctgcctccctgtgggcattcaccacagtggcagatgcaaggcagttggagggggagcgggtggtgccccgatggagactgtatgctgttgcacaggatgtggtgttggtttgggatggggtgctgaccacctgcgtgggaggatcccctgttctctgtgcaccattagcacaaaagcagggtgctggcagggatggggcttgctggctgtatgctcaccaaggctccttttgcaatgctggtcgacaggagtcagaggaaatattgcactcccatgtactggtggggcaattaaagcaaaacccgcctgtacaaacttgtgccagcaaagtgatgtggggaaatgccatgggcacaggggaagctgcagtctggggagaaaatgtgagggctggtgcatggccttaggggttgccttgctggaactcttcactggtcaggcatggttcactagcacagaagctatctatggtatgggcccccagggcacccaagacttccttgtaagtaggcgtggccaggctggggccccaagagaggccagcagactaaggagttctcaggtcagaccagccctatctgatgtacaagacttccccacagagatcaggtttgataattccccaagggctaatgtcttttatggagcaagtcgagcctagggggatggccatccctggccacttcccaactacaaactctcctgcaccaaaccctctgggcacaacatgagctggcttgctgatccatcactttacttgtctcctgggggctcaaccccagaaagacacaggttagcaatcgctcagtgtaatcagccctgttctgtgctgtgggcccaagccaggggttccctctctggtgacaagaattgtgggtatgtgggaccctactgtgggagatggacttgccttgtctctttggttcgactgcagcctattggaggtgtggacaaggtacttagggtcttcgctcctttattaattcaagggtagcaagaatgtttccactgcagaggcagtggcagagaggctttcacttgcctctaaaggctctgtctggggagctgctgagttgctactggctcagtcactctggcagaaagtggctagaggcccagacctggaggacctgcctggtaaggagacaggggaacaggtatccatgtaacagtctggccacttttccttagggctgctgtgctatgctgggggtctactccagtccctagtcacctcagattttctagtacctggagatatcatcaatgaaggctgtgagacagaaaagatggcagcctgcccctccctctgggagctctgtcccagggaggtatgggcctgttgtcagcacaaacacacgtgtaggaggtagctggagacccaagttgggaggtctcacccagtcaggagaaatggggtcagggacccacataaaaaggtagtctggccatgtttttgtaaagcagctgtgttgtgcttagggtcctcttcagcccccagtcacctcagacactctgaagcctgaaggctggaacggctaagtcacccaaacagcaaggatagaggcccacccttctccctgggatctctgtcccagggaggcctgaaacctctgtcagctggagaagactggtggggataggtggagacccattaggagggtccacctagcgatgaggaatgggattgaggcctgctttagaaagcagtctggccacatttttgtagagcagctgtgctgtgctggggtaccacttctaaccctggtcagcttgggctctccaaagcctgaaggctggaaaggctaagttgcccaaacagcaaagatggtggcctgcccctccctctgggagctctgtcccagggagtctttaaatctctgttggccagagaacactggtgcgggtggctggaggccctggttgggaggtcccacctactgaggagtaacgggattggggacccacttaaagaagcagtctgactatgttttggtagagcagctgtgctgcactgggggaatcccttttgctctcagttggtttggactctccaaagcccaaaggccataatggctaagccacccaaacagcagagatggcggcctgcccctgcccctgggagctgagtcccagggaagcacaatgctgttaccaatggctggctggaattccaagccagcgtgtcttatcctgcaacataaggttctgttccaagcagaacctgcaaaccatcactgctcagccccttggattcagcctttttcctaggggtatgtacaggggtctaacctcccactttgacaaagttgcagctaattttgctgggatgcccagaaagccagagtatttaaagctcccgcgtctccatgcatgcatgagtggctcctttgctgagacagatagctctttgtgtcaaactgaaggccctggtgggctgggttcatgaggggacctcctgacctgagagttgcaaagatccatgggagaagcatgggtttccagggtcgcacattcttttactgcttctcagggcaggggagcttctctttggctccctgcgtgggccttcacccagccttgcctttctccattctccttggtctgaattgtttccttgattagttccaatgtgagtacctagatgtttcagttgaaggtgttgtatttacttacctcttctgttcctctccatgagaggcacacacattaactacttctagtcggccttcttggccactcttccccaaccccactattattatgttgctgtctatctcttttcttaggtctagtgagttttcaaaaaatcacctcattaacataaactcagatgtggttaaaaagggattattatgaataatagaaaatgctcctttacctttattgctcttatcacttaggaaattctaagtgttttagaaactctgcgccagaaatgggacaaagaccaaatgtatattttttaaattataaatcacaatatcactgtgtctaactaggcttagaatacttgtactttatacttacctggtccaatttgcataatgttatattctctttcactgtagacagagtgacattctgcagaatgtaaagatgattatgcatcctgtgtactgtattatgaaagagacagacagcaagcaatttaacatagcctggtccatgatcatagcccgctgcccttcctatgtaagagcataatgatttatttattgtatttattgatggggattgccatatatatatataaatacatatatatatatataaatacatatatatatatatatatatatatatatatgccagatcaatagatatacactaagtatcatatgttgtgttcatgtgttcaaataaaaacaacacatccacattgcagctgcaatggaggccacccggttaagtctgtggtagaccattgccagccatagagtttttgcaaaagccgttcaaatgaattaaatgggaatgtcaggataaccatcacacgtaaatttttgaggagggtactaaaccttgcaattctactcagaatatggttttgtttctgaagtctcagaagtgagaaattctatgggcattctcttgttttttcttatcctatgctatccgattctcttgttttttcttatcctatgctaagtcgttagtatatgctaacgactcattctacaggccaagaaaccaatataaaaattttgtcagctgcagaatgtatccaccccagttcagcacttagagatcaaggaaataaccacagagtgtcttggacttgggctttagagtcttttttatcacctgtatctacttcaacccataccctaactggggagtcatgcttccttttatgtctccaggttatcaatgacaaattatatgttgaggccctgaaaaggtctaggtaatttccctaccttttgcacaactattctggtaaatggtttgaggtccccttggagaaagattggtggagtattttattgtacatgcttgctgcagcgttgcagtctctcccttaaacacagtcacctcagaaaaataagtcaccatgttcagcccccacacccaggaggaaaggaattaagatctacctcttgaaggcagaagtatcaaaaacttggtaggcaaacttaaaacaaacaaattgtctgattttagttgtttcagaaaatatcccaaaggtactctttaatgtatatactctctattatcctgtttgttgttttatttctcctagaatttatggaaacagcacaaataaagtaaactcctgactttttctttttggctggatattacactttttgtatgtttagaatagattattatttccagcaggatcaccagattatttcaggaggaaataatctattttaaacttagatactccaataaccagatcaatgttttaaaattctagttgtcaaggtgtttttgttattgtttattttatttttgtcaatctctctgcagcacacttagcctactaaacagagtctccaagtaatgacccagccatctgtatatatattttaaaacttcatacttaatttttgctgtacttggttgaaaactgttggagtttattaattttctctttgttttaaactatcactttcaaagtgttgttttgattatattttcctggttcactaaaacatgtgaaatatacatggagatgatggcttaggggctttgtaaataatactaatttcaatttaagtgattattgtttgtgttacataattatcatctctgggactctgtggccttcacacagtgaggtcatcaattcctggtgttgattgctttacataatgaacttttttctgtattttgttcttagaaactaagtctgtaggggaaaggagataaacgttactgagggtttgaattgtataaactctgtgattttaagttatggctttttaggcctaagcttttcatcctatgaatactttaaaatattacccagggtagtcatagaaatatttgaagcttaaaaatatgagtctgttgatttgtggagaatcactttgtatttctgtaaaagtttttgtaaaatttttgaaattaatctttatgaacctagagtagaaactaggaaaaagagagaaaagttttcatgtattctacattaggccaatctgactacattaatattactcagtattattcaatgcttgtaatatcctgggttttttattatatttgtttaagtctaaggaaaattagcaaatgtttaaaaaataagatagcataaattaattaattaaaaaaaaacagcatagaccctttaaaacaaaggtgcaaactctgtcttatttctgcctgctcctactcccatctctcatagcctcctttaactatttctagttttgtttattatcgtagttaccctcacaatttatgtacaggtagaataatgtgatagctaataatgtggaatctggaactaaactattggactcaaatcctggcttacccatttgttagcttgacaactttgagcataacttttggtgtttccattttgtcataaaaaatagagatgaaagtatcaactttaaaagttctagtactttaaaatattttagaatagtgtttgacatgtagaataggtgttagctagtctcattacctccagatttctaaatactatagttatatcactattttttgaattatatatttagaatattttctactgataaatgaagatttaactcacataacccagcttgtctggctgctccctgcagctatttctatgtatattcagggcatgattccccgggttctactttatttttctgtaatttcctatccctttaccactttccagaagtgtgttgaaaccttccataaactgaaagttcttcttttgttcattttattagcttttaaataatatgaaatattgaaagattacccagtatcttgagtttacaagccataaatttttttaaagaaatcaagggtgagatagaggggtaaatgatgtgctttaatttttttattggtatataatagtcacacatttgtatggatttgtatgattttttttacatgcatagaatttgtaatgatcaactcagggtatttagggtatccatctcctagaacatttatcatttctatatgttaggaacatttcaagttctctcttctagtcgttttaaaatttcttgaatcattgttaactatagtcatcctactctgccatggaatattaaaacgtattttttctatctaactgtatgttcatacacattaaccaacccttcttcatcctacctcctccaaagcccctcccagcttttggtaattattgttttactctctactattgtgaggtcaatatttttagctttgacatatgagtgaaaacatgtgatatctgtctttctgtgcttggcttatttcacttaacataaaaacctccagttctatccatgttgctgcaaatgacaggatttcattcttttttatgactgattagcattccattatgtatctataccagatttcctttatccattcatctattgatggacgtttaggttgattccatatctttgctactgtgaatagtgctgtaataaacagagggaatgcaagtatttctttgatctactaatttcctttcctttggataaatacccagtagtgggatttctagatcatatggtagttctattttttagttttgtgagaaatatctatacctttatccataatggtgtactaatttgcattcctgccaacagtgtacaagagttcccttttcactgcaccctcttcagcatgttattttttgtctttttaataatagccattctaactggggtaagataatagttcatgtggttttgacctgtgtttccttgatgattagtaatggtgagaattttttcatattcatgttgtccattgtattttttaataaatgtctattcatgttattttttgtctttttaataatagccattctaactggggtaagataatagttcatgtggttttgacctgcgtttccttgatgattagtaatggtgagaattttttcatattcatgttgtccacttgtgtttttttaataaatgtctattcatgttctttgctcaatttttaagagattatttatttattttgttgatttccttgagtttcttgtatattgtttattttattttatttattttttgaggtggagtctcgctctgtcgcccaggctggagtgcagtggcgccatctcagctcactacaagctctgcctcctgggttcacaccattctcctgcctcagcctccggagtagctgggactacaggcgcctgccaccacgcctggctaattttttgtatttttagtagagacggggtttcaccgtgttagctaggatggtctcgatctcctgacctcgtgatctgcccgcctcagcctcccaaagtgctaggattacaggcgtgaaccaccacgcccagcctattctgtttcttttgtttgtttgtttttgagacggagttttacttttgttacccaggctggagtctgatggtgcaatctcagctcactgcaacctctgcctcctgggtttaagagattctcctgcctcagcctcctgaataactgggattacaggtgcccaacaccacgtctagctaaattttgtatttttactagagatggggtttcaccatgttggccaggctggtctcgaactcctgaactcaggtgatccacctgcctcggcctcccaaagtgctgtgattataggcctgagccatcactccctgcaagtttcttgtttatcctggatgtgagtcccttgtcatatgagtagtttggaaatattttatcccattcaactggttgtctctttattctgttgattgttgtctttgttgtgcagaagcttttagtttaatatactcccatttgtctatttttgttttgttacttgtgcttttgaaatcttagccataagatctttgcctagatcaatgttgtgtagtgtttttttccatctttcttctggtagttttatagttttaggtcttaggtttaaggctttaatccattttgggttaatttttgtatgtgatgagagacagggtctagttccaattttcagcaaatgggtatttagtttccccagcaacacgtattgaagagagtatcctttccccagtgtatgttcctggtgcctttgttgaaaatcagttgaccacaaacatgcggattgttttctgggttctccgttctattctattgatctatgtgtccattttcataccaataccatgctctttgggttattatggagttgtaatgtattttgaagtcaagtagtgtgatgtctccagctttgttcattttgcttaggcttgctttggctctttgagctcttttttggttcctacaaattttaggatattttttcctgttttcgtgaaaagcgttcaatggcattttgatggactccattgaatttgtagaactctttgggcagtgtggtcattttaacaatattaatttgggttcatgagcacaagatgcctttccacttgtttgtatcctctttgatttctttcatcagtgttttgtagcttttcttgcagagatcttttacctccttggtcatatttattcctagttattttattattttttatagctattataaatgggattatctttttatttctttttcagttttattattattggtgtacagaatgctactgatttttgtatgttgctttgtatccttaaactttactaaatttatttatctgatttaagagctttttcatggaatctttagctttttccacatacaagattatctcatatgcaaagagagacaatctgacttcctcttttctaatttgaatgccttttacttctttctctctcttgattgccctggcgaggacttccagtactatgttaaataggagtagtggaagtgggcatccttatgttggtccagttcttagggggaaggctttcagcttttgcccattcagtgtgatgttagctgtgggtttttcatttatggcctttattatgtgaaggtatgttccactccacccgattctttgagagtttttattatgaaaggatgtcaaattttatgaaatgctgcttctgtgtctattgaggtgatcatatggtttttgtccttcattctgttgatgtgatgtattatatttactgactgcatatgttgaaccatctttgtactcttgggataaatcccatttgatcatggtgtactattatgttttatgggctgttggattaagtttgctaggattttgttgaggaattttgcatatatgttcatcagagatattgacctgtagtttcctttttgtgtgtgtgtgtctttgtctggtttgggtatcagggtaatgcagaccttactgaatgagttaggaagaattgcctcctcttcaattttttggaatagtttgagaactggtgttagttcttctttacaagtttggtagaatttgaaagtaatctagtcctgggatctcctttgttgggagacattttgttactgattcaatctttttacttgttattgatcggtttacattttatctttcttctggattcaaaactggcaggttgtatatatcaaggaatttatgtgatttccctaggttttccaatttgtgagcatagaggtattcagagtagtttttgatgatcgcttgtatttctgtcatgccagttataatggctcctttttcatttctgatttcatttatttagatctctgtttttttttttcttggctagtctagtcagtggtttatccattttgtttatcttttcaaaatcctaacttctcatttttttagacttcattttgtttagctctgatctttattgtttcttccttctatttctgagtatggcttttctagttctttgaggtgcatcattaggttgtttacttgaaacttctccatttatttgatgtaagcatttattgccatgtagtttcctttcagcgctgcttttgctgtatcctataggttttggtatgttgtatttccattttcatttgtttcagattttatttttatttttttctttatttctttattgacccagtggtcattcaggagcatgctgtttaatttccatgtatctgtagtttccaaagttcctgtttttcactgatttctagttctatttcattatgctctgagaagattttggtataattttgattttcaaaaatttgttgagacttgctctgtgttctaacctatgatctatcccgaagaatgttccatgtgctgatgaaaataatgtatattctgcagctgttgaataaaatgttctatagatgtattttatgttcatttggtctaaagtatagtttaaatataatgtttattcattaattttctgtctagataatctatctactgctgagagatctctccctttagatctaataatatttgttttaggtgctccagtgttgggtacatgtataattagaatttttatatcctcttgctgagtttatccctttgtcactatataatgatcttctttgtctcttttgactctttttaacctataatttgttttacttgatataattatagctactccttcttgctgtttgcatggaatatcattttttcaaatccctttactttgtttatatgtgtctttacagttgaagtgagtttattgtaagcagcatatagttgggccattttaaaaaacacattcagcctatctataacttttaagtggaaaatgtaatctatttacattcgtggttataactgatatgtgaggacttgttcctgtcattttattcattgttttctgttttttttgtatatctttgttcctttctttctgttttattgtttataattgtgatttgatggttttctgtagtggtaacaattggacctttcttttcctcatttgtgtgtctgttctgtgggcagcgtgctcaggcattgtggtaagtagtgccaggcttggagggccagtcttcagaaccctcagtggtgtgcacaggtggaggctgtgatgtgcagggtgaggtgatacccaggaccccagcagagtactcaggtggtggcagcagtggtggcagtgggtagggagagcctttcctcagggcacacgcaagtacactctggccctgctgctggggtagtggggcagggttgttattagtgatagcaaccatcaacaggcagttctcaagttttagggagcatgtgcttcgtcctctagcagtggtggaaatggtggcagctgcagcagcagcagggagagcaagtttccatggtatatgtaagtgccctgcagtcctgctgatggggagatagggttgctgtcagaggtcccagtcccggacaggcagaatacagtctctggaagagtatgcgctttggttccctttctctcagggtcagtctcccagtgtaccacactgtttgttacatggggtgtaggacactgtgtgtgccagaacactagagaccctgatgctatgctgggtccaaacatcattgtgccactgcatccctgtaggtggatatggggagatgttagttgggctccaggagtgtggagatgcagaggctgttgacccccaagggtgtggagatgcagaggctgttgacccctacccaaagggcaggatgcagcctggtggagtctgggctttcaaatggtgctgtgttgcagttgcttaggactttggaggtgtgtgggacccagcctgtgctccctctatgaagcaatcctattgcatggtctccaggaagctccctaagctagtctcagggcctgtgagggtcagggccctctctcatgtctagggttgcagaagtctgcaataggaatgtggactgctgcagatctctcacttatactttccctgaactagggagcctctttgagcccccagccaatcacaggtaagctggctgtctcacttccatctccttccgtgtctcaaatatttcttgtcacttctctgttgaattccagtgtctgctattaaatgctctattcaaagtagaattgtcttcttgctcttttggttcttctttgtggaggagatgaatgccagatgtctctcttcagccatcttgaagcccattcaatgtgtaattttaagtgaatagggaaagacagaaaaacttgtgcaaaattacattaaaagtaatttaaagtaattttgatgctcaacttccatatgtaaaatgaagtagttgaacaagatgacttctaggatccttcaaactggaacattccatcactataaaatgggcgttattttccttatcaacctctagttttttcattaactatggtagcctaatcagtttcaataaagcacagtctatgcatactgcttttccttttgttccgaacggagggaccgactgaagccatggtagaagaacataaattgtgaagatttcatggacatttattagttccccaaattaatacttttataatttcttacacctgtctttactgcaatctctgaacataaattgtgaagatttcatggacacttatcacttccccaatcaatacccttgtgatttcctatgcccgtctttactttaatctcttaatcccgtcatttcgtaagctaaggaggatgtatgtcacctcaggaccctgtgatgattctgttaactgcacaaattgtttgtaaagcacgtgtatttgaacaatatgatatctgggcaccttgaaaaaagaataggatagcagcaatgttcagggaacaagagggataaacttaaactctgacggccggtgagccgggtggaacacagccatatttctcttctttcaaaagcaaatgtgagaaatattgctgaattccttttctcagtaaggaacatccctgagaaagagaatgcgtccctgaggggaggcctctgaaatggctgttttggggacagctgtcttttatggctgtagcgggtcgtagcgggttgtagcggagggatgaaataagccctgtctcctgtagcgctcccaggcttattaggacgaggaaattcccacctaataaattttggtcagactggttgtctgctgtcaaaccctgtctcctgataagatgttatcaatgacaatgcatgcccaaaacttcattagcaattttaatttcgccccagtcctgtggtcctgtgatcttgccctgcctccatttgccttgtgatattttattaccttgtgaagcatgtgatctctgtgacccacaccctattcgtacactccctccccttttgaaaattgctaataaaaacttgctggttttgcggcttggggggcatcatggaacctgccgacatgtgatgtctcccccggatgcccagccttaaaatttctctcttttgtactctgtccctttacttctcagaccggctgacacttagggaaaatagaaaagaacctatgtgaaatatcaggggtgaatttcccccaataaagtagtcaaacaagatgacttctaagatccttcaaactggaacattccatcattataaaatgggcattattttccttataaacctctacttttttttcattaactatggtggcctaatttcaataaagcacagtctatgcatactgcttttccttttgtttccttactagtattcatgtctgtacactaaatttgaaagataacatagccttctacactagtatcttagctgagtcccttgcttccactctttctcttatattgtcctactttgaaattgcttccaaacactcattggataaaatcacaactcttaccatggcctacaaaccttttctaatttgatttgtctttcttctatttcatcttctatcaatctcttcttctttactacatcctcataatactcgtcttcttagtctttaatgtccaaagcttttccaaaggtttccaaaagccttttcctgggtattaacccttgtagtgtcctctgcctagaatggtcttccaatctttctaattgcctgttgaatcatgatgatttgttaaggcagatgatttactttgtattaaagaatattcttaagataattctaaaaccatgcttaatgccttatattattcagtaatgtttatacaagtgaaatcaatttgtattttaaattaacaaaccataccttcagtgatggtcaccacccaaccatatccacttatgtactacatacatattaatttttccaactgtgtgtttacttttctaatacttctattcttctagccatttttagtggtttctcctgaattaagttatccaaattttatttagtgtagaagaacccaaatttcaaaggcaggacaattaatatgattaatagtgtccatgaagaagttcctttataagacattaatgttctgctcactaatatttgttgcaacctaagttttttagaaataccaaaacactggtgatatatagtatgagttttaccagaagcttattagttggcagaaataaatgtgataggttccatattatgcttagggagatgcgctttacattaaaacaaaagttaataacaatatattgtatccttggaaaatgcaaaagagcagatattaactgttcttgccacaaaataatcatgtgagatatgctgcatgttaattagctagatttagccattccacagtgtgtgtgtgtgtgtgtgtgtgtgtgtgtatgcaacatgatgtgcatcatgtaaaacatgttttgaagtatattgatatatatatttttgaagcatagatatacttcaaaacatcatgttgcacataatatatataactgtcaatttaaaacaaacaaaattgagcaaatatttaaaagtaaaaccaacaaaaccaaaaacctatgccactattattgtttcctttatgtcattaaattgttttggttttatagtgtcatctgttcagtctacaatgcttctatgtcacatcaagtaatagtagcagaatattaggaggagtggttattcagttttagtttcaaagcttagaagagaagacgctgcattgtactgcaggtcagtatcaaggagatcaggttgagtcaagagtacaataatagaaaaggctggtggaattgaggatccgaattgtagggctctctgtaggcataaggcaagacgtgaaaatggatatcctggaagcaactgaaatttcaggctatcaataattgtagaaaggatagaaatgcacaaagattgaagaaaatagtgaagctcaggaatgggcaaggctggttaaatcttaataaacatgacagtgagaagcttggaccccattatcaagaaagagggggactctttatattcaccgaggaaaggagcctgagtttaaaaggggaagaaagaaggagcccttgagttatgagagattggtgaacatttcattactctctgggagatttacttactaagtccttacctcctaaccacctggtaggagttagcagaaatagggctcagataaggtgccttcaatgtcagtgggtatgtttgtagtaaatatgaccttacggccacaaaacgaagaatgcaaaggaggccacatttctttatattaactctaattatattctgagtacccatgcccctgggctggaggttaattcaatctctgtgatcatgaaggttcttttccttcctgtccaagtcacggataagtcctgaagtttaatctgcacttaaacccctggaagctgctcttgtcttcacttcttactgatggttattaaatgttcaatgaccaagtcttcttggtgctctgagtttctggaattctgttgcttcaaaaatcctttattgaaacaaggaattctgatgcttctcaaggctcagcttgaaaccattttgatcctaccacttcccccaagggtaatgaagctagaggaaggttttcttttggggccttttggagtcctgaccctccaccctccaccaaagtcaacttctcccctttcatcttcatgatatcaggaatgttttctctttgagagagggcagtgctctttcttgctgaagactttctcaaccaagtttctcatctgatccacaaaacaattctccaaaagacagtgtagtagaaatactattctagatgtataagaaagaaattatcgcacataatggatgaaaatcagggcttgattttctcgtgcaacctcaggacactgtgtgtgccagagcactagaaataaaacctaatagtctttttcaggtgcaaaaagactattagagatctggtggtttcttcctttacatcacactatctgtgcacatcacagggccccacgttgatggaagacccaggactacgcttttccattttaaatcagtttccaccatcttggcagcctgctttcagggagtctgaagccgtgtcatctctctgcctttccaaaagtgttcagtggcattcagacttaactgtccaactgagaggcctgaggctatgatcataaagttgtttccatcagtgcgagccaccactacctgctcctgtggttcttttatcttctattccttctgtaatgtgtctccccttattagcgggaacccaggtctttgtcatcttactagtctcatgtctccttcctagaagctggagattgttcccacaattctcactcttaaaaatattccatacttttaaaatttttctccaggtcattagcatcactttttcaatgagcattaacttttacaaaagacagtaagagcagttggcctcaagcagcttttgtttttatcccataaaaatgaatatttttgacaaggaaactcaaaggccttagtatctccttggaagagggataaaaggagatacagaagggacagataaaaattaatatctcagaaaattctgtttctacaaaatttggagcttcatataggcaaggaaaagagagaatatgctattctgtgagttagtgggggaccaggccagtaatgggccaggatttttgagttgtgatgatagcacagagagttctgagtccttacatcatggtgcctgatgccagagggcaaatgttagaaaatcaaccaagatgatttacgggtcaaagtattatagtgtgtctgagtctaaggattaaagctagtgctcttaagagaaaaatttgaattgaagaaccaagtaaaacagatatcagaatattaacagtatggtatagttggttggaacaaaaaaattccagagatataaggttagtgctgatgaaggcagcaatcccattttccatttttattatggaaaaattttttaaaagcccaaggagaagggagcctactgtgcatttgtgtcttgatttcatagggttcagtaaagcaagttaccccatttggttgcaatgtaggcccctgataccaggtatatcacagtgggtatcaaacatgtaggtgttaatggagttgtgagtccctagatgggacgtaccaaagagtaaggaagatctgactggtaaatatcagcctcaaggcttgctctcttgtgtgagcctaacaacagcccctaccatcagctcacataagaaatactcacgagtatttggtttgaatggtattcattggattagataaaatattccaaatgagatggtctatgtaaagccgtcatatctggtgcaaatagataatcaatattcttatattaggcatagaatgtattagagaatgtgcaaagcagctgtctaagaccttgttaggagaaaataagttcaggaactttagttcattgaaagtgatttttctggtacagaatctaatacctagaaggatttatgaagacaaaattatggaccccagtactcaaaaccagagtaccaaagtaaaagcaacatcaacagcaaggcctattacagaggcagcataattgctccctgatccagaacatgggacactcctgtgacctagaggtgtgagccagcccagtccagcatattggaagtgactaagcctctgatgaaataagtgttctcacctacaaatgctagggtcacacggtgtgtgagaacctggagaaccaatctagtcacatacagttattttgaggagaatggagagtatctcttggagcctaagagtgttgatatgccaatttaaaaatagttttgtcttacactaaaaatatctggattccaaaaggaatgtgattttacttctaatcagaaaaacttgacagtaaagagaaacacgcatgtactcatatacacaatggcagctatgcttctgataataaagtccttaaaaacttttttaactgaatttttaatgttgttaactgagataagtgaacacaatgtgaaattctcagaaaaatatgttcttacaaattatcttcccagacagttacattgaatacatttatcttgcacaaaagttgcctgatagaaatattggggcatgtatagagggctacattaaaatgaggaagtaatgaccccatcttctagagtattttcacttttacgcagccacatttgttcgtttatacagatgtggaatcatggattttcatctagcaaaatagacaatattttcatttatccatttattctagaaatacgcagcacattttatattccaggcatggagagtacaagaattatagtctacatttttggcctttaagaagttcactgtctggtggaaaaaaacaggcccagagagagagcagcattaatacaaaatagcacgacaactgcaggaacagaaatacgcacaggaagcactcaggacaggaagatcccacttttaggggtccaggaagacaccttttaggaagtaacacttgagtctagaggggttagtaggactacagctgggaaactaaagactcttttgcacatcaaagcattatttatagaaaacagcaaaatagcaagcatatttatattgtttttttcaatattaatattactaaactgaagtctcttcacacaacagatattcacaggtggtaattacatgcaatcaaccatgctaagtgatgttttaagtattccaaattaaaactgttaaaacatataaattattgcttggaaaacagagagtctctaagggctcaatctaacaataaaacttggtcataaatatataaagtcatacacttactagaattatagaatatttaacattgaaaagaatatagcagaagaagcaatgaaatatatgtattttgccatcatgttcacttatctcagttaaccacattaaaaaattcggtttaaaagctaacaattgagatgaaacacatcacaatccaaagagcgtgaaagagcctcattgaataatgaagtttatgatggctttagccaaacaaagtaaacctacaggtaacaataaaataattttcaagttcttccagataaatagcagaatacttcagccacccatgaagaacatcttaaaaccacatggttccattaaaatagaaaacattccaaaatgtgtggatcttgataatatgggttaaaataattaaaatataagtgatatgtaactctcaaaaggtaactgaatgtcttagttaatacaaagtaattaaatcaaatttatacaaaattaatttacccccttcaaatcaagagtatgtaatttgtaatatactattgagaactgtgtggcaaatatataatttttaatgaaagtagttctcctacccctgtgcctgccttgtccccattcccactcacacagaccttaaaaaaagtttcctggatttcggcctgggctgcatcaggctttaaatattagacaacccaaggaaacctgaatgcagagtatagagtgacattgtgtcttctgtgtgactgttttccttctctgcattataattccagctctgtactttcctgccttgaaatcttaccttcccagcttcttcccacacagttctcttggatcacttttttttttttgccattaacacctgatctcagtccctttgtcttcctttgaattgagcagtatagtgctataataatttaaaacatggctttagctatgaaataaagagagccctttctctaaataaaactgagccttaacatactaatatctctatgacccatgattaagttttgcctaccataaaaattaaataaacagtgtaagtgtatcttttcaaaagaagaacaaatggaaacgactcaagagctcctggtcatgggaggggggaaaggccgatagtaaaacagtgaaatttcatgagaatgggaggcaaggaagtgaaaatagacttccatttatttcagatttcttcttaggaagagccctgggtgtttgagtcttgcaaggctttcattctgggtgttcacagctgtactgagctcctgctcagtcccacgtgttgttacaggcactggccatgccacagtgaacaaggctgcaagatcagcaggccaaatatatttatttccatttaacagaaaagagaacccagggagcttgcccaagtgattttcctgaggttcttagggatggttttgacagaactgcatcaagaatgaacttgtcatttctgacagcatggataaacatggagagaactgttaagtaaaataaaccggacacagaaagaccaatactgcacaatctcacttatatgtggaatcttaaaaagttgaactcagaggtagagagattagaagggtggttaccaggggggcttggggagttcttggttaaaagatacaaagtgtcagttagacagggggaatgtttgggacttatattatacagcatgtggatgatagttaataacaatgtattgtatttttgaaaactgcccagagagtagattttgagggttctcaccacaaaacatggataagtatgtgcagtgatggataagttaataggccagatttaatcattccccaatgtataaatatatcaaaacatcatgttgtaccttatgaatatagaaaatttaaaaaaataaatacttcactatatacaataaaaaatagaattcagaatttctcattgctctttgtgaacagtaactacaatttagaccttagacatatgatttttataagacattgtcgtattttcttccatcttgtatccatttatctttgcttctgttactgcttcaccatttttctctgtcctttcctctattttcaagcactttttgcactttgctgctgatattgtatgtgttgctcaatcattttaaatacatagacccagtcagaaattcccatgataatctctaccttaagtatgctgaccacagtgccaggaaggcaggaggtgtgtcagtacattgcctaagtgccttgatcatgtgatcagatactgtggcacaggacaaagggaatagaagaagcccaaggaacaaggcaaagtaaaggggaaaagaagaactcacagaacagctaccacattgcactggaagcccaatagatacaaccatgctgttatagtttgctgatagaaagaggtttcaataacactctgaatctaatcatgtcagaagttattaggccacttgatccatgatcaaaagcaagaaataggtacatattttgcaacatagagcatgcaccctgaattgtgtgtgtgtgtgtgtgtgtgtgtgtgtgtgtgtgtgtgtgtgtgtgtggaggtgggggggttgtctggtgaactcattgatattgtttgtacttcatttttatctgaaattcattgcaggttttgtcccaaagaattataggaggattgggaaagtcttagaatgttctttcataaaatctctgacatgtcccttttaaaaaattgaaaggaaaggggctccccattcatattggatttttcctattttgcacaccattgtcttctgatcacctccaaaatcactttccattatctttacatatttggcaaaaaatgggcgatcagtacactctacttttatgtacaacaaacattagaaaatggctgtgctgagggatagttgagaaaagcactaaggtatcttatctgtctcttgtcaaagagctaaacattatgacattttaaaaaataatctctgttgtcagaagctttaatgttatcagttacctgtacccaagactttggaaatagtgttagtattgcaaaaagagacattctgggaatgaggtgtacaaaagatgtcggaatttaggatataagctcattctgtttatttgcagcttgatttctctaggaaggaaatgtattctcttttcatttaccgaatcttccagataaaagacaattgttcgtaagccattctgcttgctctctccatcaagttcttggcctttgaaactagatttttatcaaagctgtacaaatcttggattttgtagatgatttgggagaggaaggtacaagaaggaaaaaaactgatccaagtctatgaagtcaatgatttgaagtactattttgtataagtctgtaaggaatcttcaattgcttaaccaattccccccaaattgaatgaatactaattttaaactgaagtaatactcataagataactataaaaaccaatttgtgagacagtttcttatactaacatatgtaaataaacatttgcatttttattgctatactcttacataaactaaaagtgtaaatataactctggcaggttataataactctggcaggtgtaactatctaaagtgatatttccttggaacaatattcaaaccgttgtctttatattgtgcttctagtcatgattttccattttacatattagtagtttttgttattttctctataaagctgaacacactctttatagataattaggcaaataattaaaatggaaaacatatatatatatatatatatatcatttattctgctatctaaggataatcactcgatttacctttgtatctttctttccagtgagatacttattattacttgagagtggcacttcgcaaagagcaactattgcatagcatcaaaaaattaaaaaagaaaaaaaaaaagggccgggcgcggtggctcacgtctgtaatcccaacattttgggaggctgaggcgggtagatcacctgaggtcaggagttcgagaccagcctgaccaacacggagaaaccctgtctctactaaaaatacaaaattagtggggcgtggtggtgcatgcttgtaatcccagctactcaggaggctgaggcaggagaaccgcttcaacccaggaggcggaagttgcggtgagccaagatcgcgtcattgcactccagcgtgggcaacaagagcaaaactcagtcttaaaaataataataataaaaataataataataaatgttattaaaattttaaagggatcatagatttaacatagttgtacttcctaaattcatcatgacaatctaatcctcttcattcatttaggctttgcttctgctggattcacttttttatttggttgggggagaatttttctgattttccaaataccttttactatattgcattttgtctgctattcctagatattgatgatagcaaatatctgcagagcatagtaaaaaactttgactcgaatttcaggccttttgtgcatgtcaagttcaaatttatatagtgatgagttcaagaccaagtttagaatccatataattacaatctaacctttcagggcccaggattctaacacctttcattcacagatgagaaaatgtgacttgggtgtggtgggtcatacctgtaatcccagtgacacaggaggctgaggcaggaggattgcttgagcccaggagtttgagaccagcctaggcaatatagtgagaccccatatttacaaaaaagtaaaaataaaacttagctgagaatggtggcacatcatgtctgtaatttcagtgatgggagtctgaggtgggaggatcacttgaacctaagaggttgaggctacagtgagcaagattgcaccactgcactctagcctgagtgacagagtgaaccctatctgaaaaaaaaatggggcctttgatctcaaaggttaattgaggcagctgagtattgagaagtcatttgagtgacagtgtttggaaaatatctgacagtgtatgacagattcatggataatctattagacaattattctccattcagaactgaagttgtaagggtaaaaacagctgataaccaagataagggaggatattataatcaaacaacgttttgacatttggtgtcacttggtctgggaacaaggataaagaataatacctggatgataaataagatagcttcctcatctagtcaataatctgcactgtagtgttctttacatgagagatttaatgaggcttaaatgaaatggttaatgtgttagctctctgactgctaatcagatatattattgggtacttactactaaacacaatgatgactgcaaagccataatcatttctctccaggggcttctaatttgttggctaatgataactataatctgtaagggaggcgtagaagtagtggtggtacaagaataggtataaactgcacaatgagggaacataagccctaagttatgctttggacataaaagctcaatgtggtcaaaagaccaagagtctgatggagtcggcttctaattgccgtagaatcctgagcaaagcatttagctttgtgtgtgacttgaggtggctctattaatttccatttgttttgaattagttactttatgcatgtgtgtgtcagtctgattttcataatcacaattcatccaaagattttctcaaaagtcagacttatctagaaaatctataccaaagaagtcacaaagaatggctcgacgttggagagaatgctgagatctaagggaaaagatacaacagatcacaagaaattattatgaacaattatacgctagcaatttggaaaaacctagatgaaatggataaattactgaacatgtgcaatctaccaagattgaattattaagaaatcgaaaatctgaacacatctatctctcaattgcctgtactggtacctagaaatgtgttttattgcattccgtattgaaacaattcattcagtcaatttcatggaaagccttcaatgtaacaggccctaagatgaacaagggtaaactggctaacgctgagtcatgacctgcaaataactgccagacctccaagggaatttatattgtaatgggccaaagcttctatttagcattaaggcaatggaatagagtttttatttgaggtatcatcaagaaaagtagatgtgacagttttggattcagtgttgtatatgatctctttgatcctgcagatgttttaatactacaattagcacacagtagctaaataaatccaatcagttctgtgttgtgaattagcatgcatgtaatacaaacataaaatttagcgactgttttttcctagtgacttcggaccttggtcattgcaattcttatctaatctctgatttagcctccaaattccaatattcaaatatccgtttatatcatgtctgtcctttatgttaaggtttttagactgaatatctaaaagtgatttactgcccaaatggcaaaatgtggataaacattgaagctgaggtatgatcacctgggctctatgttataccattatctctactctctaagatgtccacaacataaagttaaaagacaaaaaataataataaaagatatttttagatattgtccttatgaacaaaatgagtataaagttgacttgtaactgtacaggaagaaaagtttacagaaagactgagtaggcctaactgtatctgctgtcaatcaaaaaacacaagtatcacaaatattttctgctttatgaattttgcttgcatttaatcctttacatgaaagacaatcagtctcctatgtttctaagtttcctggaaggggtaatgtcatataaaccttaatcaagagttagaccttgaaatcttagctgcttaaatcacccatttctatatcgtgttcattgttattaacttaaaattcaaatcccacagttctgtgtttcatttttagcacatcacttctggtagggaccagatgtttcctttagactaggttatggcttcttatttgcttctcttttttatcttaaaatttatacctactaatagcttccatgaggtcatttgcaggacattacagtatagagtccttgagctggcagcttggaataatgttttagggacaaggaaggaagctctaagggaaaagtgtggaaagggaaagagaaggagacagacacagtatatggagataccagatgaagctaagaaaaaaatagacagcacactccaacttgcttaactgtgatctccatgcaaaaaaaaaaaaaaaaaaagtcttacggggaaacattccaatttgcattgtaagtgtatcttagtattcaggtaaacttttaataattgtctttaaaatacagctgagtatttccatggcttaatattctccttataatattaaatttgtctattatgtatcatttaaggggaaaagcaaaaacacagacaatgttattctctgtacttcttttgatgtaaacaaaacaaaatatataacttctagataaaaagcgaactaaaaatattagtgaaagtccccaaccctaattttaggagcttccaaaattgcttacaagtgtgctctgtaatgcaaaagatgttcaagtttatggatcaattaggacattaagataataaaccagaattaaaccaagtattagcatatactttacatactaattttggtcagaaacattccatcaaagattaaaatttggtattacatctacaaacagtaaggcaagggttaatgtcactatcctgagctcacttctttcaggaatctatgactacagtccctaattttgataatatatcaaacaagtatgaacagaaaatgtataagttttctttatcatcgaagagactatagcaatgagttattaaatggctatttgaaatgtatctcacacacaaatataaagatatcttgttatataatattaggtcttaggttttatgctaaaaatgtttcaattttgatagagatgaaatctcttctcctataccctcgtatttatgactgatttctggctatatgttgtgtcacctcctgaaccatggacatgaccactgattataatctgaatttggtaataagatacatgaacttgacatgcccaccaccccgtatcttcctctaattgtaaattgttctaaaggatatacaatatttgctaaaataaaagtatttcttagaggtacctagatcatacccccaaaatagtatggcaaaacatattcaatttatacacttagagttccaaagtaaagtatacaaatctggcaatttgatgccaatttgtgaataaggaaatgggagatcgtggaaaataaggaattgcaaagtttaaaataataataataacagaaacatcaaggcaaaagataccacaggtatcttgaatatcattctaaggttctttttttacaaatctgagacacttaggttttcaaggacagttgaaaataatgaagcaaagagcaattataagccaagatatgccaaacatgaagagaataaacctttgcactaaccttccataccctttcagtgtctcctcaattcctactgaatggataccttgcccaagcatttaacattttctgtgatatttcctcagttttctttttcttttttcccaaatttgaaaattatttcctacttcttgagttggcagagcttcaggcaaacttaatgcctctctgcttcatgtacatatcccatatgtttaagggcctccaagtctttttttaaactgtttgctctgcctagaagctcatttctttccctttccacatgttcatatcctatgaattttttcaaagttttacataatatcctattatctctgcatttcctcatctccttctgagatgtcaaagcaaattatttatgcatatcttacagtttaataattagctactttctattataactatcatctatctactattgtactacagtttttcccaaccactagtttccaatattcagggattaacaataacaaaaatggtaaatgtgtctgtttccatttcgattttaaaatcaatttggactctaactgcttgaaaaggaaatcagcagtttcagatcctcttagtggttgtcaaatgagcacacattcaacttatcaaactgagcagtcctagatataaggagaccttcaaacattattcaattttaaatctttatttttataaagttattttagatatcattggttaaaggtattgacaaatataagtatattgaaaaccacaattgaaagtagagaaatctctatctgtaaatttgcaacaccatctttatcggatttgaaaattacattcagttgattcatattccaacaaagcaagaagcgttgtctctggtatttcaaaaccaattatcagaaagaaaatgtatcatatatatatatatatatatatatatatatacgcacacgcatatatatacacacacatatatatacacatatttaatgttttattagtataaaaacaattcacatggatggagaagtatatttattatatttattaagcagactgcaccttctttcttacctcataattaagaaattaaatacccaaaatatgaaaaacaaaataatataatttaagatgtgaaatacaaaaatttaaatagcaattaataaaagaagtgtttatctatattcgatgaccaaaacggtagttaaatttcaggttacttttcactgtatatttggtactaaaacacaatacattaaaacataatttatgtgttaacacattatccttttattagctgattattttagagtaaaatttatttattagtatgaaagaatcaaatttagctcttcattggggtattattaacgatacataatccttaacaatttactaatataattaaaaatctaactttatcttataatgtaaaaattaataatatttttaagaactggagggtttatgtataaatataaaaatgggccacaggtcagaaaatgtttagaaatattaattgaaaataagaataacaaaaactaaatataataaatgctttacacttactgagaaacgtaatatatcaatcaatcaatagatgagtaaatacataaagtggaaggagaaaatagcccctgaggtcatcctctagaagttgaggacaacatctcgctgatagccagcaacgaaggagaacctcagtcttactaccttaaggaactcaattctgtcaacaatcttgtgagcttagaagaggaccctaagtgccaaatcagaattcagctcaaccaaaactttgattttagtttcgtgagacactgagaagagaatccagccattccacgcccaacttctgacacacagaactatgaggtaattaatgggtatgactttaagccactcagtttgtggtaatttgttatgcagcaacagaaaatgaatacattagggttgctattttattttttttgctattcattcctatcattttgtgtatcatgacaaacaattttttttttttttttttttttttgagacggagtctctctctgtcacccaggctggagtgcagtggcgcgatctcggcccactgcaatctccgcctcccgggttcacgccattctcctgcctcagcctcccgagtagctgggactaccggcgcccgccaccacgccgggctaattttttgtatttttagtggagacggggtttcatcgtgttagccaggacggtctctatctcctcacctcatgatccgcccgcctctgcctcccaaagtgctgggattacaggcctgagccaccgcgtccggccgacaattttaagctatgtatcggactatagatttttcattcttcacagatattatttcatagaattaaggttcatcattaaactgtgaacatttttcattgtgagttaatgtgataagtaaatatacgagaaatagtttattcaactggccaacagatatttctggtgtgttttctatgtgctgagtagtcttctaagcagtgtggatatggcaatgaacaggacagtaaaacttccctggcctcaaggagctgacattttcatgtgaaagatattaaagatttttaaaataccagacaaactaatgtgcaataaaatcaggtagcataaataaataaatgcaataaagtgggttagatgatagggtatgacgagaggttatttgaaataatggctaaatgaagacagggagcagaacaggcacacaagtgtctgggggcaaaggattctaagtagactgaacagccagtgcaaggtccagaggcggaatatagtttggcattttccagaaggggctgtgtattttggtagagtacatgaagtgaaatatggtaagagataaggatagagaactagtcaagggccaaatcatgtgaagtgttatagattctgaatatctgaagataatctctacttccgaaccctgtattagaatgctttgaagacatttaatattttaatatttactctttcctttttttgagacgctcagttgcccaggctcaagtgcagtggcgcaatcatagctctctgcagccttgatttcccaggctcaagtgaccctcccatcttagcctgccaagtagctgggactacaggcacatgccaccgcatctggctgcttttgtttattttttgtagagacaggtcttgctatgttgccagggggctggtctcaaactcctaagctcaagaaatcctcccacctcagcttcccaaagtgctggaattacaggcatgagccaccgcaccctggcctaatgtttattttttataaagacaaacataatgaagttatcttagagtttagtgcatgaagaaatatgatgtcttccgaaggactgctacattttcctgtatctgatgagagctttgaaacacaaagcagttccttcgtggtcctggctgccaggagacaccaagcttgagctccagtgaactaacagtccttagctaaggttttggggaaaattcatctcctctccttcatgactattttctttgttatttattttatgtcaccattggttttatgttgttcactgctgtttcaaatacctttggaaataagtacagtttttaaaaatccataaaatcaccacatttgccagtctggaatgtttctttctaaaactatgattcacatgaaatccatttattaaataattgttcagtatctgggaactgtctgttaaattaaatgaataagcccccaattacaccagtgaggttaaatacgttgctaagtatgataaaataagatttaaatgtacaggtaaaataaagcctgatatgcaatattatgagaggtcaatacaggaagggtttttactgcctaaggggaaatgaagaagacagcacagagataaggtacctccactgaatcttaaggtaacaccactgtgtgctactgaatatggtaatgcttgctgtacactgcccagtactaaagggtgtcattcatattatatattatgaaatagtatccaatttggtacaacttattattaacatattaatacatatattatgaaatatacaatattgtacagcaagcatacttataaatatatatcatgtatgatgcatcatatatatacatcatacgttatacatgatatatatgatatacatgtcctatatataatgtatatacatgttatgccaattttcttgcagggtgcagtaaaatgccatgaagaaatggcttcttttatttgcacagttatcctatgggccagtggtagcacaagcagtaatttttaaacatggaaatacccattaatttagatttgatttgaccaggttgtatattggacatgttattattttttcaatgcttcaagtatacacaccttgttaagaatcactgaatctggagagtaacatttagtagagaatggaaaattctagatataagaactatttgaagcagtgagagatgaaaagtgagaatgcagggacaatttcattgaagaacagatgattcaaaatagaaacaataggtgagggccttaaatactgaggagtttgaagtccattatctgggcaatgaggattattaatgttttattttaaataagtcaaataatcaagtttgggacttaggaagattaatctgataaatgagaagggagcaaatcttcatgcaggaagatcaagtaggtcacgatggcagtggtcaacatggtggtgattaaaacctgacttaagtggatgcagtgaaaaataaaacacaggagacaaatagaaaaaaatatggtgaagttaaaactgttagaaattggaagatggttgggtgtatgggtgacaatttcaagctgagtgacagtaggtatggtgatgaaatttatggagattgagaacacagacttagggagggggagatgtgtgtttaaggcatctgagaagagacagccacaaaaggttgacatgcagttacaccacagtgagtcaatcacaccagagtatccaagagttcaaggcccagatccatggagatctaggtccaagtctggccatgtggggcaccataacagtacagtaaattacttaacttttctaagcctctatttaagttgtaaagcaaatattagtatcaccccaagagttaaaaaatattgagataataaacactgtaccagtatgtagaaaagtcgtaacaatgctaactaatcttataattaggataaaatttaggggtcaaaaattaaaatttggaattaattgtgcagaggtgctaaattagacccacagagaaaaatgcattatcaaggaagagaagatataggaagaaaagaaaaaaacatagcctagaccttgatagatccctatacttagaacgcaggtagagcagtgggaacccagaagtagacagggaaacagcagccaagaaggtcactttctaatctttacatttaaaaataggcaaaattgaaagagtggtatatgaactgtattataagggctggaggtctcaattgcagagctttgctagaacttttcagtctacctcagaaccatagtacttaatccttccatgttttgctctaagaaagaggatggagctatagttcactagatacagccttgtaccatgcttgtcaaaaaattacaataagaattgtttgatcgttactgattactatctgataacatcaaaacaaagtttcataaacataagtgctacagcatggaagtaataatgataacaaaccaaggctctctgtctgatttaaaaaacagtgggacatctgcttggctgctaccataattggctaccagcctgttgttttgttgtgctggaagagggactttatgtcctatggatattatttgttcttggtccagggggacccaagtttccattagattacaagctctatgcacatagccagatgtgtgcaagactcttgcataagttctgtaaatcatgcttaactttattccttttagtattgggtttcttttagtttcctttggtcctttctctgtgagaattaacttgtatctccctggactcatagtgtctacggtgtcacttggtgtgttgtaactctccctgccatagccttttgaaagcctcctatgataaccaaactaaacagatacactgacgtttcaatatcactgttcgttcgtgctgacattggattcaattctattcactcattcatttattctttcattcaggaaatatcttttcagcacctgctgtataccaatcatgtagctagatgtgttctcatatgttatccaaagaatgagtgttcatggtaggatacagaatgatttctagaatagctcccatttaaagacttcttcaattaatctcactctcatttcctcacgcaccactaccaccactaaacctgttgatattactttctaaatatgtcttaaatccatcgttttttctccacttttttctgcatcctttttaggccatattaccattacagtcaagcataattgccttactggtttctccacctgaattcttatctctcttcaacccattaaccatgctgctgttggagactttttcttttcaatgtaactcagatccaatcgtgaatctttccagattaaaatacttcaaagacttcttgttgttcctgggataaatccttacaaactactgtgatatctggcccatctctaaaccttctgcatcatctcttattttccctgttctctgtcatccaggggcattggccttctgctttctgctttcagttatttaaacctgctgtgctcttagctgtccctggcaggctcattgcagttgctgctcccttacctttgaatgctttccttaattctttgccagttaaagctgactcatttttagatattggtttatttagctcaatgtacataaagctacattagctaaataaactaatatctaaaaatcttgtatgtatatgtacatgggaatgtatgtatacatatttgtgtgtatatgtgtatgtatgtgtatatgtgtgtatgtgtgtatatacatatatgtacatacgtatatacatacatatgcacacacaaatatatatacatacattcccatatacatatatccatacatatccatatatttacatacatacattatatatccatatacatacacacacatatatatatatgcgtgcatctattagggaagcctctctgatctctcagtctagcttatcacattgcaacttttttcccttcactaaacaataatatacttgagagcacaaattttggctctttaccactttttccccaaaggagtagcacaaaacatatatgtaaatagaattgcaatatatcttgcttttgaatgaaaaatgattaactggtaacccaaccatcttaaaagggaagaatgctgctttgggactatactgtttcttgcaaattcttgtcaaggcttttataattaatgaagatgacaatagaatggaggaaataaataaggatactaatttagcaataattttaggcttcaaagatttgaaacattactccattaaattattttaatagcatatatttccattaatcttcattatttttgaagaccaaacacagagtaagcattcttccctaaagtcagctttttcaaacatgtataatgttattttacttttaaattggcagataaaattgtgagtatttattgtataaaacatgatgtgttttgaagtatacatagattgtagaatgactaaatctagctagttaacatataaattacctcacatagttatcatgtatgtggtacaaacacttaaaattctctctcttagcattgtttgagaaaacaaatatatatattaaagtcagttgtgagcagcaatggcaataaaaactttaccttaatctgatgtttagaataaggacatttcacatatgctagattagagaaaagcaagttaagctgagaagattaatagtaaacctttgtcatagctctcctgtagaaaaatgctcctaatgaaggatgtgtttgggtgaaattgtttattccatgaaaacaaacaagcaagtaaacaaaaaaccttggtaataagagtgcactaatagaatcacttacaaattagccctcaagtatttttcagagcctgaatttatagtttaggcaagctaataatgatacaagggcattttttcaaatatatttttcctaaacacaaggtagcaaggttaatgtgtaagcatcttgttgaataatactcattgttttcaagtgggcagaggggtttatgccagaatttctctagaaggccacaaactgttccttcccagttgcgtttcagagccaggggttcaaaaacagttcaccattaacttttacacaatggactattaattttaaaagtcctaaacacactcagcattacatacacaaggatgaagtaaatgtcattaataatacttcaagcacattggatgatggcaatggaatagagagaattatctgaaagaggaatagcactcagaagacttcagagaaacaggacatgggaagtgctgggtaggagtgaaaacatgaatcctactactgcctgtatattgatgatgctttgcatatgtacagatgagcttaattacttgttttgagaaaaagatgttcacacagaaatgggaaattctatgatactgtcttgtgaaggacattctggcaacagctggaaacagctactattagcaacaggattgttggttcaactttaatggcttaaagttaggccagacaaccaattggggaaaaaaaaaaagtcctaagtttcaatggacattctgtgatgaaatgttcaggtttgaagacagttggtgaagaaaacttctagggattccctaaatggagggagtcaatggtcttgtctcagtgatttaccacagagccatcgtgctttttagcacaatctaccacaacttttccctctccctcaccacctatccctataagctcatgcccagcagggagtaaacaatttaatgataatgcatatatgattcgtggaaaggaaatacaggatttcctgttcttatgggacataatccatatttgaagataacagtgcttacaatgtcagaggcagtctatgatatttactgtgttcctagaaaatatgcatagctgtgttcactgaatttttaacatgccttcttctttgataaaataatttgtttaaaagttcctagttcaaataatagagaaaccttttacacatagggaacaacatttttttccttaattaaaaagttcacattctacaatatttggaaatatgtgaccctacttttcacgtaaagaccatctgacctaaagggccaactccttgccacctgattgtccctttctctgtcacatatcagacctctgactggctgagaggtagccatcagggctggccttccaggatctggaagatcaaaatctgctcatacaaactggcaaggagaacgtgaaaagcataaatgcaagaaatgagaaatctccgtggctggagtggtggcttatggatcctctctctttttcctgtcttagggacataatgcttctgggaatgtcctggtgtcatagcaatactctttagggaccatttctgtgctttctgtaactttgtttaagcaacaaaaaagcaaaaaagctttggacttgctcaaagggtggctaatctgatacagataaagtgtggatgaaactcatttttagcctgtaactatgttgtaggatggaaaagaaaacttgcttgtgggtcaaaattttgtgggttagactctcaaatgaatcagttattcaccatgtgtccattgtcaaaacttatccttttagttgcagtttcttctctggaaagtgagcctaaaatattaatttgaaagcttattttgggattagaaaaggagagtgaattagatggtatctacgtcgtaaagggtcaggcacgtgagcagtgctcagtacataggacctattattaaaatatgatgaaaatactggttatggtgatttgacaaaacaaccttcttttgtggatagtggttactacttgatacagaatagtttcatttaaagagtggtaactctagtctatcatttccctttaatgtgattctgtaaaagaaattttaattgaaaatatttaactatcaggagagaaatatgacttttccagtttctctgttcacttcgttttagtatagaattagagattcttaacatataaatcctagaaagtaatttagaaatcttgtcattatatcttcagagtaataactttcatcacagggtctgtttgggctgagagtagagctttattcatgtttaccagaagtcccaagcaaaaattttttaaaccaagtacattctacaacccttcaaaaagattcaaaaaacaataatttaaaccaaagaactctggcagtgcatgacattttctgcctcattaaatgaggcaaacaaaaaatgaccaaatgactactgaaaacatagaggagaaaaaatactaagaaagtttacagagactttccagtaacaaaagttactggaacaaaaatctgttttgttgactcaatagtaatcaatattcacttttatgttgttttatgcttaagacaggaaaacctgagccttcctctttactatcagagcaaatggtaatcatgaagtgaagcaaattgattattgattactgattacttgaatttctatgttttataagtagagcaaccatctgttaacaggaataacaggttttagcagggaaaggattaagggttttattttcctcaactgaggcccaaaatgagtgagatttttcaagttaactttcattccatttggctcaggtgtcagggatctatatttaacttgtgttaggcatgcgtccgaagagctggaaggctgaggatgtcaatggctttcagatgtcaggataaccttaaggatagatgaagggttgagagcctgtgcctcatttctgagttctcagctgctatgccgtggaaatcctgtttactttctgcatctgctcctgcaagactctggagccagtcttgaggtcctacatctccgaaagcaagctcttctagaagttggtgagcagaatgctttttgtttagaagtgtggctataaatgtctttgtagttgatgcactctcatctagtaagtaactattatttttgggctctctagaaaggtaattattatctgatataatagtttagtctgtgatgcttcttttaacatatttgtaagttttaaccaaatggttaaagaaatttgctttttaacccttaaacctcacatatccacaagtctctaaattccataggatgctatggatttctagttgcctagttcatgtcttttacttagaaaacgtcagaaaacccaaacttctcgtgacttcaaaaagtgtaattgtacctgaaacttcttttccttcagatttcttatttatgttttctgataggtttttaagattaatcttttcagaaggatgctctaaaaatctggccaatttgattatcctcttccaacttggaaaaaatatgtatttaaaatgagactagaatttgaatgaccttctttcatggaactctgaaaatgttttttggcttgctgtcacaactgacaaatatatttaagaaataacctaaaagaccaatcttaacaatttgactcctagacagaagaaaacaaaaatctttttatacataaaacttactaatcattagtgatcatagaaattttcttgagtgtgggtgccacatgtcttatttgtggggtgggggcagattttgttacatagcagaatttttattatatggtgtgtttcataatatggctacataagatcagacaacaccgccaggaatgacagagtcgttacttatacagaaagtcaacttaagttatgcatatttcgagacacaattaaggttgatacaaaaaaagaaaagcagttccttctgtttctccatgctattctgctattctacaagccctggaaaagaattagataggcttctttgcctttacaaaaaaggtcactttcttttattatttggggaatggttggttggtgctagactgaattctggggaaccatttaaggctaatacttccaaaggggtaaacttgttgacactccttgagagaactcacaattcagatgggatctctatctcaaagagaaataggcaacctatcttgttttcaggtgtaactgactaaataataaaagtggatttgtggggcaatatatgagacttctgtaatcctgacaagaggaaaggaaaaatattttcaaatgatgtactatgcaaatactaattatttggaatctgatacttttgtaaaggataatgataactgtgtaattaactgttctaagagttcaagaaagctaacacctgaggataataaaacagttttcacctggggaaaagataagctctggaactcaagaattacagtcaggcaaaaaaaaaaaaaaaaagagttttaaactgctgagaaatgattgaaaaagactgcttaaggttgtagagtgggatgattaaatggaaggaaatgtttcagagcaaagaaatataaagttcttgatgtgactgcggctcattttgcttttggcacaaattactgattaagatgactacttaaggaatttaatctgatattcttagtatttacaaacaaagcttcaggttaaattgttttgaaaaataaagaaatgctataaaatgagtgaagtgcacttcagataaaaattgtgaagtgtgtgcaacgcgcttcacaacaggttactttattgccacctgtgaggagcaagaggaggtactagaggaggggaatgaggttgggtttccatatcatgtgactagaatcctcagtcatgtctaatccacagtggttcaatcacaaacaataaatgctcatcaggaaaagtaaatgattgcaaacagatataagtgtgcaatgaatataaaaagaatatagttgagtaaatagttttagtgttctgttgtatatagaagtacagtaattggctaagccactggaattttttttttttttttttttttttttttttttttttttttagcaaagtatgccattggttccacaataagctttcaagtcatttctttatggaaaagggtaaagtgaattctgatttgtatcttctgacaaaccacgtggagaagtaacacttttagatacgtgcttgttggtaccctgctaaatagctaaagatgttttgaaacatactcagagacctttgtcacacaaacactatagtacaaagaaggaaatgacagaaaattggcaagcattagaggggacataggagacagcttggctcattcaccaaggactccagactgtgctcaaatggaaaaccattgtttgcccttcagtgcttgtgatgtttaaaggtgaaatgaggatagtttttaaaaataaattattattagtttcatctcttcattaatgttgttccttctcattaagtcttataaatattacttttctcatttaaatttttagaaaattaaaaaaatatatattagtcatgtcatgttttacgaccatgacttaataagaacacttcagtctaattgaaattcatttggaggttcctttggtcccatgttggaacttcactgtaactttatgtaaaatgtagcaaatgccattgcaagatctacttcttgtatctcattctggtcagttttagaagtgaagtaataaaaattagtgtgttcaatacaatggtctcagaaaatagaacccaaagcatcctgtctttccagagaagatacaaaattttaagtaaactggatatctactttaagactgagccctcaaacatgaaatacctattttgtttgaatacatgatggagttgctatctttcacatacctttattcattgacatactctttcaaaaatatttaatgaacacctacactgctttaggaaatgctattagaagcaacattgtgctaaacatttataagaatctaggatcattttacaggtggttttctgaaccttgttcatatagaatgaaacttttgatgaaggttaacaaacaaaaactgttagttaatggtgaaagcatattcatcattttatggacacttttccccatgaccccacaacaacagctcccttaaagtgttatcagtctctgggggaaaaaaaatggaccaaatgagtgacagttatatttccagaaggactagaaggaagatactgtcagagttgtttccattgcttgctctaagcttctcgtttttgcatcatttactcttaaaatgctaagtaacttcacacaacataggaagcctctccagaataaaatatctgtagtatggactctaagctttaggattgataacttcctaaaattatttcttcttgaactatttcatctgaaatggggaataaatactagtcttgattttatcttggtctcctgggaagacctttaatttctattagccccatccttttaagagctgtttgggcaataggtacatctaagcagatgcatagacaaagaattacagtgcagaaaggtatgagctgtgataagcttaatatacagggataagagcattccttacagacctttgctattgcctagagttggagcatcttgccggcatataaactccataaaggtaatggagctattccatttgtaactacttgtgttagtaacagcaatgtcccagtacctgactcatacataataagcactcaatagagagattttattcatttatttaaaatattgtctaaatatttcctaaatcaaaatattcatcttctactaaggactatgactaaaattttaagaattttgaatcacgtaaataacttagatacatttctttcttatgtttagcactttttctaaaaatatccaaattgatgtagagctctactgtaacataatacgtagatctgtgcaacttttttttttgtattaaattctcaggtaggtagtttaatggaatgttactactgctgttcttcccagcatgtctggctgggtttgtttatttttacaatataggacagatcctctactcacaaaatgaattatgggatttaatagagaaatattctataatttacaagacgctaaatatataaactcacagatgctgagaatgtctcagtgaatcaattcatgaagctcattcatttcacctaatgcctctcaatgatgtcctagtccttttccccagtctgcatgcaaaacttagatgtgcttgctactgtgctcagtctcttagatgtctttgccgcatgtactgagttttggatgaagccagagagaaacatttagctcagtccatttcactctgggtccgagggtcatcttggagatttgctaatctttcctccaggaaagggttgtgatttctccacttttcacttcatgaacaaccacagcatgcacagtactgttctttgctagcctagtcacgtatcccctcaaaaccctctctgaaattgggggatggttaccagctggtggtaaaagtacaggcatcacccattttctttctccatcccttagttcctttctgacctagacagctgcttgaatgttccttccccttcagtcttccaatctttgtgtattttatccttgtactgcagctctgttataatcattcaacaaaattctatatggtttaccagctgaagttgggaaacacaggattaaacaaagtgaaaaataaatcctattattaagaggcaaacaggatgcttactataattcctcccattatcttctccactccattaatattcctcttgagtattaaaggtagcattttgttctgtcaactctcccatgcaaaacttctgtacatagtaacagcaagagagtttctgaagctgaaatcctgtagaataaataaaagcaactgaaacaatctgaatggtcctttgaaaaaaagaagaaaaagaaaagcacttaattatttaccatggcaaagcaacagctatgaagcttgccttttctttttttctgaggcttagggctggacgtctactttcagctgctctgccaaagtttacatttttttcatagcaaaagctacaaataggagaagtggggatagtttttagcacactctaaaactaagatctactgattttttacaaataaggacatggaggcttgtagaagttagtgaccttttatgcctttgtctagccatattgctttcctcagtttccatttctgcagattttctaggttcccattccccatcccccactttctaagtgatattatcaattttcatgacttcacctgtaatctgaatgttgaggagaccccaatctacatcttagggctccaatcactcttctcaacttcagacccatgtatctccatgccagtaggtcaagttctcaagctgaaagtatctaaactctttttgttgttgttgttgttgtcattgttgagactgagtctcactctgtcgcccaggctggagtacggtggtgcaatttcggctcactgcaacctcctcctcccaggttcaagcgattctcctgcctcatcctcccgagtgctgggactacaggtgcctgctgcctcgcccagctaattttctgtatttttggtagacatggggtttcactgtgttagcccggatggtctgcatctcctgacctcgtgatccgcccgcctcggcctctcaaagtgctgggattacaggcgtgagccatataaccttgttaatgtgttctgattcaagatgtacatttttatgttcaaaattaaattataatccccaaatgagtgtcttttactaggcttgaatttatcccagcattcaataatatatatgcatataacatatcccctgcaaattattttaaaataaaatggttaaattttaatagctatttattatctatgtggtacctgcaaagcactctaaaaataattatgcaaagtgcctagtatttaatgagaagtaaattactggttgaggcatactctctagtgttagactgcatatgtttgaaacttagatctctaactttccagctctgtgacctctggcaagttagtaaacttctttgtacctctgcttccctatctgtaacacatggataataaacatgcctacctcatagggtaactgttcaagataagcaacttaatgcatataaaatactcatacaagtgtcttgcatatggtaagttccatagaagggttaaatattatttaagttttacaataattttaaagtagatagtgttatctccattttacaaatgagtaaacagacttggggagattaaaaaattggctcaggatcttgcagccagttagtgaaaatgtcaatattaaaccctgacaggactaacttcacaccacccctaaaactggtcctatgtttcccctccaggttaatagtacctccttttgtcttgttactcaagcgtaaaacctgagacttacgattttttcctctctacctaactaattagtcaccaagccgtagctattcatgctaacttctaaatatcttccatatccactaagtatttctgaaatctttcccacatttcccacccccacccccatagccagtttttaagttcaactacataatttcctttctagattattttgataggcgtcctctggccttccctccaatccattcttcatgctgatgccaaggccatctcctaaacccaaattttgtcatgcgctccttctctaaaaatccttgagtagtcctatgttgctttcaagataaacccacgagagaatgaattccaggtaatcaaggcacacatacaatataaagtttggtatagtatgtgttacattagggcttcacgtttgtggtcatttgtggccacttttctggtgtcttgttcttccaaaactcatacactgtaccgaatccttactgaaacatgtttccccagttgtatgtttattattttgtatgtttctttatgtatctgtatttggggaaatgcttgtgatccactataccctctcccactctgtacccggagctgtacaatgcagtcctggcataaggaaccacttcctccaccactgtcctttaacaccttctctccctcaccattcactcttcctacctgagtgtagatgtcacggcctattagaattgtctgtttatgaatctgccttcctagacctgctgggagctacctaagcggggtgtcaggtttttgttttgttgattctcacgttttctcccaatcagaagtccaaactaagaatactttaggaatgtatttaagtttactcttgcaagggctactgattgataaaatatttgccaatgtaattggggggaataaaagcatgtataaataaaacaaagttgatgattcaaactatgatagcagaataatttcacacgtaatctgaagatttcaacaacaagagcttgataggagacataatacagtattagagtcagaaaaaatagttacaaaaagcctgagttagtatttgcctgtcttttggcttgtgatctgttggtgaagggagccagatgagaatttggttcaggttacaagtatgatcacccagcaggtgcttgctatgtaggcaaagggttgaggacaagataagattaggaaaggacatgcgctgtgaggggtgagccaagctgtgggtctgatctaggtttaaagccttccttggaaaacaaggactggcaagtgaatactggaaactgaagagtgagaagtattatccaaaagcacacagctcacttttaacagctgattaaatgagactagatttatcacagtagttctcaaaaattggcatgagaatgataaaaaatgtttaacttggtattcacaatgcctttttaaaaattgttactatattgtcattgtaattatcatcatcattactcttattttgagttttcctgatctatatttgtgctctgtatgtctcacctcagactacctaagatttttagtcccttctaggaagttatttaaaatctacccacaattattttggtagccatttactgagagggtaatttagcttcctaatattatggtatttttatgtcatcttttgtaaatacaagaatagtaatatcttcagtgtagtcgctgaggcttctttcctttagtgaagttttagcgaaacagaattttcctctatcttcttttgaacatattttaaacagttattttaattttatttatttatttattttttatcttttatcttttttgagacggagtcttgctctgtctcgcccaggctgcagggcggtggcgtgatctcggctcactgcaacctctggctcctgagttcaagcgattctcctgcctcagcctccccagtagctgggactacaggcgcccgccaccacgcctggctaattttttggatttttactagagactggtttcactgtgttagccaggctggtctctatctcctgacctcgtgatctgcctgcttcagcctcccaaagtgttgggattacaggcctgagccacggcacccagccagatttttttattttttagagacagggtctgctctctctgtcagtcaggctggagtgcagtggcacaatcatagctcactgtaatctcaaactcctggctttaagtaatcttccccactcagccacccaagaagctgggactacaggtacacaccaccatgcccagctaatttttgtggttgtttctttctgtagaggcagagtctctctatgttgcccaggctggtctcaaactcatggcctcaagcaatcctccctcttgggccccacaaaccactgggattataggcctgagccactgcgccctgccttgaacaaaattataataaagctcttgagtgttttgtggcctttcagcagatgctctgcccccctgttgtgacctggccatgtttcttgtctcagcctgcttttttctcccatacatgacacagaggccctaacctcaaaatcgtcgtcccgtgtcattttgcacacccataataatctctcctatttcttatcactgtggcatcttctaatttttcttctttgagtttctctttagtcatcttgaaaattctgagagattgtgctagcatatacatgagagcctcctgatagcactggagttaggagccaagtttcttagatgctttattactgccaatgtcctttctttaaccaaagaccaacaggaacacacctgtagtgaaacaagttcattactcattgaaaagagaggaaagtgtaccatagggaactgacagtgacccggtaagaagatgttaggaaaaatctattctagaatttggacttcggttggttggttggggagggtcgaggaggtgatactgaaggaaatagagatttgctctgaattagatgttgtcaggaggcaggataattttatgattgggtgtcttaatcttggaggagggaagactagactgaagctaaagctgtaattgataaagaagcagagtcactcatagtaagtgagaagggaatgtgtagtatctgtggcttggacagtgttgataatcgttttgggttcagacataaaaggtctcattttgtcttgactcatcatgatcacagaatgattttatctaaagtaaatgctctatgaattgtttgtgttcagcagaacaaacaccaaggccaagcagtgagtgctgggcctgtgcccagaaacagcaagacctagctaataatatcagcccagctcctgggtgatgggctgttttctctttacagtacaaagttctttgttacttcagtaattaaacgtgcacacctgaaatccaatttccactactttgatgattgttgaaatgagattcttttgaatgtccttcttaagttctataatatgctcaatacactgagtcctgtaatataaaatatcattcctgttatgctagcaacctgaaaaatcacaggagatcagtccctgtataaaaatgataatgtgcacaaattgtttgggggcatttattcttttctttgcacatataccataaaaactaatttgttatataaatgaaaaaattatgcctttggcatatataaaatacaatgaaatgaaattttaataactcaaagcttcttatgaagaaattaaggggtctttctacttactatgtagatgaacagcatgctaatcagattgtagaatcctgcagttgggaattatcttaaaaagtatttctgaaaatatgcacctctgtggaacttatataaatgtggttaaatatatatactcaactttctatttagatattccagataccacctgaaatagaagagataatctgactttttctattattcaaccatatactttcttttgttgtttttatttctttaattttccacattgacagatataattgtatgtattcactgtgtcttaaatgtataagcattgtggaatgggctcaatctagctatttaacatgtgtgttatatcacatagttattatttttgtggtgagaacactttatatccactaagcattttttaagaattcagataaactttcatcataagctttgcttaaataaaaaatctagtaagtgattcaagtctgtgattgaataatattccatatatttaggtagtatatggattcaaaatgagtagaaatattgacaaacatcccatgctaataatctactttgtaacttctcataaatctgtagaggaagtagtagtagagagaggaggggagataaggctataaataaacttgattccatgagtcacacaaagaaaaagtatcttttctttatggtaatgtaatatttaagacatttgtaatattcataattgtattactttctttacattatacatatatgctttttaaacatgagctgcatgataaattcaaagtttcagtgccatatgtaaacttaagtttctctattttttctttttgcagggaggtgagggttgctcttaaaatatgataaaggcaatacaagagaaatagtgtgttttaaccactgctgtatttatcatagtatcttgttaataagctactttgattctactttatggagatttttcctttagttactcttgaagatatcatctaaaccaagaaagatattcattcttctctttctccttaaggtctatcttttcacaagatcctacttcatctttcctattttggaataaaacatgcagctctgttttatgtgagccagaaataatttactgaacaggaaactgtagttaagaagtaaaaatcacagtgaaaaattttaacttttaatgggacaaagaggcttgaatcttttacggatgagagatgcttgtcaggggcctaagagatggggtttatttaagtctagtcagcagttttgattcttaaatttgaatagttcaaaagtcaaattagagtaggatcctgataactgagttgattccttgttaacagtaataaaaggtaaatattatcaataaatataaaatatctaccagttacttgggaagttaatatagtacttttggagtatattttatacagaaccaaatgcatataattagctaatgtgcttttgggtgtctatattttgtaataatactatctgaaaagttgttacagataaacatttattatttttctgaaagtcaaagggatattttgtatgcccggcttagcagcagttgtctatttgaaatgaaaataaaagagcattaatgccaatcagctttcttactagaaatattcctgtacttgatgtttttccacaaactcttaacacatcacagatattcttaaactacttgtataaattataccagaataaaatgggcatcattctcttttttgtttacatcgaatgtttgtttctccagagcacatccgtattgtggagaaacaatggtgactgtttttaattgcaaaaactacccagattctttcttggagagcctccttgttttccactgggtttagacataggttctctttcactctttatcctacatttttagaccatcataatgtatttatattttatacacccactggccaacaagagaatctatatatatgttcactaaaaagcaggtttatacaattagtttactcattccttcttcctagtaaggttcttctttacttgagtccagttcctgactccagaataaaaatgaaattatcaatgtctcttgtacattagtctgtgatttttttgcaggggtgccctctgtatcttaatctttgcttcttcttcgcggctccatctttccctcaaattccccaccatgacactgaagtacttccccgattctgcccttccttggaaaccacatctgagttcctgaccccaattccaataccccagtttataatgtgaagtgggaaattgggggattaaatatttcctgatatcagttgaaaactgtgggtgcccttgttatttgctctgctacttgttagctttatactgtatttgtcgcttcaacgaatgccaatataaaagaaatgctaagtcctttgttcctttgaccttttgtgtttttttcccctctgcttgcataggggcgtatccagttttcattacttctcttctgtctacccctgctgttatgttccagaatgccaccaagatgaaagctaaccaaaagtatttctcccacttgtgataatgactcttagggcttgctttccagttttacagccctctttgccatggctgccactacaaactgcaagcacattcccgttaatccaaactctgcctagaatgagaccacattcccttcatcaggctgaatacaagttttagttcagggccttgtgtctttcccgcattcatttattagtcatcgagctgaatttctcaacccaatttattgcttttcatgtgaccttttaaaagtacaaactcgtatcctgtcactcctccaacttataattatttaattgttctattctgcttacagaataaagttcaatctccttagaatatcatgcagggggcttcaaggtctggtatccacctgttttcctcactttttgcaacttccctgaaaaccatttttgtacatttgcaagcatatcacttcctttttgcctctgaatttatgcatgttgttctttctgcttctattgccctttttccatcttctgtgattagaaaatatctattcatccattgaagcccttctgttattttacaatctatctcctatcaacaaaatcacaatctattcaagaccatattttattcatctttgcatgccagcgccatgctcaaagcctggagtatgattaaaggtcagttagtgtttgaatgaataagttagttctttagtacgtttcctttctcttaactcacaacttgaagttgtattatttctttactcttcagaatttctcccaaaatattctaaggcgggaagcttcatgaaaactcttggagttttctctaatagtcttaccaaaacaaatggaagagtctttcttggtttccatgatagctttctttgtttcagattggttaattttatagttcacttttcatttgtcaggataattctgtttttaggaaggatagaagcttggacttaattttattttgaattttgatttaattttgatttgattttatagccttaacagataacactttcttcctttaaagaaatctatctttccaggcaataggagatcttgttgtatttctttgttctttagagttgattctatagatattccttgactttttgttagggttatatcccaataaagctagtgtaagttaaaaatatgaaaatatcattgtaaaaatgcatttaatacatctaatctactggatatcatagctcagcctagcttatcttatatgtgctcagaacacttacattagcccacatttgggcaaaatcatctaatacagagcatattttagaataaaatgtggactatgtcatgtaattaatcaaatctagcattgaactatggtttctactgaatgtatattgcttttacaccattgtgatgttgaagggttgtaagttgaatcattgtaagttggggaccatctgtgtgtgtgtgtgtgtgtgtgtgtgtgcctgcacgcacacacacacacacacgcaatttgagcagataattgtgttatcaagatggtatgacagtccagtattttaaagtgatttctctagaggaaagttattatttgacaaatactatgaaaataaatctcaaacattttcttaagtctccagttgttatcagttgggatgattttgcctgcaagtaacaaagtccaaaagaagcagtttcttgggtactttttattttgttcatataataaggagtcaacagactgaattaaccagcttggaatcatccttaggctcactgatattacttaattcatagggctctaggttggtttttcttactgttaccctacaagtgcaaagtggctacggcgattgtaaggatcatgtctttatataacaatgcctaacaacagtaagaaacaagtttctgtcttgtttcagtcttttaaaacagaaaactatcactacagctctgtagctgacttgtttttatgcctcagtgtcagcattttgttatatgcttgctatacatctcattatcaaggagaattgtggctaaaactaatcaatattcaacctctgtagcttgggagaggttttataatcacatagacatgaaatatctaacacaaaatcagagctcagtgaggagagatgaggtggaaagagtggaagtaaattctgtcatagtaggtcctattctaatttacatgagttcaatttttgaaaattaaaatatatgtgtcctcacacacaggggaacaacacacatgggggcctttcagagggtagacagtggagggagagaatcaggaaaaatcactaatgcgtactaggcttaatacttgggtgacgaaataatctatagaacaaacctccatgacacagtttacctatgtaacaaacctgcatgtgtacccctgaacttaaaagttaaaaaaaaaataaaatatatgtatcctcaaaataatttttaaaaagtaaaattgctgtgaagggccaggcacggtggctcacacctgtaatcccagcactttgggagcctgaggtgggtggattatctgaggtcaggagtttgaaaccagcctggccaacatggcaaaaccccatcactaataaaaataaataaattagccgggcatggtggcaggtgcttgtagtcccagctacttgggagactgaagctagagaattgcttaaacccataaggcaaagcttgcagtgagctgagattgtgccactgcactccagtctgaacgacagagcgagactgtgtctccaaaaaaaaaaaaaaaaaaattgttgtgagaaaaacaagctcttcaaacgtacattggatgctgaagtttctatttctcacttgactatgatattcttttcaattacatctgtgctgcggtcttctaggggtttgtcattagagaaaggtcagactgataagatagtaaagtgccaaaagttggtcatgcctaaattcattggaaaaattacttagtttaggacagaattttattccatttatgtaaagatgattactattttctgtcatgcacagtacagttctttcatgaatattgttaggagaaattttataaatttcataaatgcttttggttttttttacactgtttcatatggatagtaatagattatagtgtgatatatatatttagaccctgcattcagggtctgagtgcagcagccagcatttaactcttagctcagcactgtttgactttgagcaatttagctaacctcacagagcatcatttttgccatttgtaatactgtgaaaatagtgacacttaaagagtgttgtgtattgtttgtgttctgactgctacactgttcccctttcttgttccctttcctggagccaccgtagtccctgagacatgactatattgaaactaggtcaatttataaccctacaatggcctctaatgttcaagtgaatggaagtgtcacacatctctttaaataaaaaaactagaagtgattaaacttagtgaggaaggcatattgaaagctaagataggatgaaacctaggcctctgacaccaaacagttagctaagttgtgaatgcaaagaagaagttcttgaaggaaattaaaagtgctaccccagtgaacacacaaaggataagaaagtcaaactgccttattgctgatatagagaaagtttgagtggtctggatagattaaatcagctacaatattcctgtaagacagagcccaatccagaggaaggtctttactcacttcgattctgtgaaagtaaaagaggtgaggaagctgcagaagaagagtgtgaagctcacagaggttgattcatgaggtttaaggaaagaagctgtctccataaaataaaagtgcaagataaaacatcaagtgaagaagctgcagcaagttatctggaagatctagctaagatcattagtgaaggtggctacactaaacaatagattttcaatgcagacaaaacagccttccattggaaaaaggtgccatttaggacttccatagctggagaggagaagtcaatgcctggtttcaaaccttcaaaggacaggctgactctctagttaagggctaatgcagctggtgactttaaattgaaatcaatgcttacaaccattataaaaatcctagggcccttcagaatgattcaaagtctactttgcttgagctctataaatggaacaacaaagcctggatgccagcacatccatttacagcatagtttactgaataatttaagcccactgttgagacctgctgctcaggataaaaggatttctttcaaaatacaactgatgattaacaatgcagctggtcatctgagagctttgatgggtatgtccaataaaattaatgttgttttcatgcctgctaacacaacatcagttttatagcccagagatcagagtcattttgactttcaagacttattacttaagaaataggaggtgggtggtcacttaaggtcaggagtttaagactagcctggccaacattgcaaaactctgtctctactaaaaacacaaaaattagccaggcatgatggtacatacctgtagtcccagctactcgagaggctgaggcaggagaatcgcttgaacccaggaggcagagattgcagtgagcctattttgcaccagtgcactccagcctgggtgacagagtaagactctgtctcaaaacagaaaaaaaaaaaaaaaaaggctataatttccatggatagtaattcatgtgatggatctggacaaagtaaattgaaaaccaactgaaagtaattcaccattccagatgccattgataatatttgtgattcataggaaaggttgaaatagcaacatcaacaggagtttggaagaagttgattgcaaccatcatggatgactgagggttacaagacttcagagaaggaaataactatagatgtggtgaaaatagcaagaaaactagaattagaagtgaagcctgaagatgtgactgcattggtgcaatctcatgatgaaacttcagtgaaggagaagtagcttttctaattgagcaaagaaagtgtttttgtttttgtttttttttagatgaaatctcctggtgaagatgctatgaacactgttgacatgatgtgtagggaaaaactttctaaaccatgtttttcctctgcctcatgccacaacaatcatcacaaaagcagagttcgatgacaagaagtgtgggggttttccacacacacaccaagcagcaaacaccagctggatgtcatccaactcagttccgacactatctacatggaaatagttagatcccacaggttgcgagcttagtccccaagattgcccccttctttcaacactagtcacaagtccaagtctccaggactaccgacaagcttcaagttggggttctcattaccccctctttgggtttgattaatttgcttgaagcagctcacagaagtcagggaaatgcttatttatgtttaccagtttattataaaggatacaaatgaagagatggatcaggtaaggtatgggggaaggtgtgtggagcttccatgccttccctggcatgtcaccctctaggaacctccaagcattcagctatcaagaagctcaccaaacccagtcctcttgagtttttatggaagcttcctgacttcagcattccttcccccaggatgtagggtgggatcctgtctggggagagtcttgagactaacaatcagaagggaggggaaagattagggtcctgccttggggcaagtgaaaggagggctagagggagattctgttttctgaggcctgatatacatgataacaaaaagtctgtaactagggttaagggaaataagaaccagaaaaggtggacaaaaaccaatatatatcataacaccacacgtgacaacaaagaatttataatattacataaagttggttgatgaagcagtggcagggtttgagaggattgtcccagttttaaaagaagttctactttgggtaaaatgttatcaaacagcattgcatgctatagaaaaggcaaacaatttttccaagtgatgtggcaaactttattgtctcattttaagaaactgccacagcaaccctgaccttcagcaaccaccacctagatcagtcagtagccatcaatatccaggcaagattctctaccagcaaaaagattattataattgttagcttttttttagcaataaggtattttaaagtatgtacattttttaatggtatggcacacttaatagactatagtatagggtaaacatacttttctatgcagtgggaaacaaaatttgtgtgactcagtttattgtgatattcactatattacagcagtctgaaaccaaacttccagtatctgcagaggatgcctatattctgggcatgtttacatttatctaattttcttaacattttctagtgttatctcatctgtaaacatgtgactagcaataatttatagaatgctttgggacaaataatacatggaagcatttaacatgatagctgactcgtggtaataggtgaataaatatttgtccccttctgtatcatttgatagaatttttcaagttgtctcacatgtgagggacaaaataaataaatgttttagaacaaaaataaggtattatgtctaataattcaaataatttaaaggtcatttatatttttttaaaaaaatccaaagaacactagagaatcaaaatcattttaaaaattaacttcatactagtaacaggccactagtaacagtgtatggaaatgaaaaagaggtattattctagttatccaagagcttaatattaagttaactagcgagagtggcaagaggcagccaaatgcctaggcagatagtggcaggtccccactgaaatcccacctctagccgaagacagtttaaagcctgaaagccacactacgagttaaaccctcagactgcattgagaacttgtcttcctgtttggcgtgctttcctctgattgatccccacccttcacctattttatatataccttccctttccaaattggtttttcacactgtcgtgcccacctttgagtggtgtctttgctttaaccttttttacaaccagcatacactccccattctgagtccgtaaaaggccccatacccagccacatgggggactttcccaccttcaggtggggggaccacccctgcatctcctctctgctgaaagctgttccatcactcaataaaattattttctgtcttcctcacccttcaatattcaccatatcctcattcttctggggcacgagacaagagcttgggaaacgctgaatgctggtataagctgggacatgccagtgtggccaagagaggcccaggtggggcatggcttgccgagggtccccggcttgcaaagagaccatgaagaaaaatcttaccttactagcattgctgaaggagaacaaagaagaataatggcatccaccaaaaatcaaagcaatactgtctcaaacattacagcagaacttggagaaaggtgttaaaaagagataaaaagtggacacagaaaaaagagcaaaacaaagcaatattctagttacatttttaaaaataatcattaggatgatttagaacaagtgtttgtaactctgggggtctctgaaccctcatttgtaggactagatgtctgcagtgagaaaataagaaaggaaagagaagaaatgtattctacacagaagtaggggaaagttccttaaactatgagtcacagctatttatatccgaacaaatgtgcatttcctattagtccaggagattctgtggtcttctacccatgcatttgtataaagaattgtcctctgtgtataagctgcatctctagaatatgaactccttgaaactacctagcaacacttaagtacctagaccaatttggacagacagcattattgggttgtcttggtaaatattggtaacttcaataaccaagaatgctctaaaatctatagctagacaacaggctatctctgaactaaactttagacaacagtccttggtagactttttttttttttttactctattatgtaaaagtagagacttatctagtaataattctagctggttcataaatctctgataccattaatttctctattgaagatctcattgttagtatttattataccaatcttctgttctaaagagataaaaaataactaaattttggacttctattaaaggctagggaccagctctagaatgaatgttctcgaccagggtgactgtccacttcatgaaagtagactaaaaataccaaactctcatatatacacaataatatatatcaaagtatttgaagtacattatagaaatcctcacagtaggggtcacattttcttccactttgtggcagagttctgagcacatagtgaccatgtgataaatattaattcagtatgtgagtgtatgaggatgtatgtcatcaatattctttgactgccttaagtgttctgggaaaaagccatatttttggtctcatttagcatatactgtaattcttatttttagggtgtatttatttttgttttaatttatttgatttgtgttgcatatacaatattgtacccatcaaatattgcttaattctttcatattgcaaaataaacagctattataagcctgaacttgttagtcttgctgggccctgcccaaggttgccctcatctccagctttccacaaactggaatattcactgatgctttgtttcttctcccagaccaggatacatgttgttatgtggttcctaggaggactgtaaagtcctctaacaaagacaaaggatggaatgaatcaagggaattactatgagaaagtagggatatccctggagaggggactgtttctgtgtgcttttagacatcacagagtaattgtttctttttttaaaggaaggaaccagggtgaagagcagctcatttttaagctggagaggttaacaaacactggctgcaagatttactttggtttaggaataccactgtctcacaggagtgtcaatcaaaattccacagccattcttcgacactaggaggtgggactgactgatgtacagcagtgatttgacccagcacttggggcaaacacaaccagagtcttcggtgttaattccctggtcttcccaactagcattctgaaagtgcattaacatttgtggccttgtgctctttcatcggacttctaatggtaattatgcctgtgtaatcacagtaaagttacctaatctaaatatgtaagatttcacactttgcttgcaatacttaaaatttcctactttgatctgacttttgctttgttcttgtccagtttaatatatatttgcatttctctctcttctctcagggcgtagaatttatggagtattgtaggcatttaggcagcctgtttcaaacttttaaataagaagttgtatctaaaagaaagtagagggataagtcaaatgatttttactatgagttctcagtaattgttatgttaataagtggtaagaaggcattcaaaaatatttgaaataatctaagtgctccaatatacacatgcttatatgcatgcaacagtggaggaatatcttaatagggcaaattcgtgtgtagccatcttttattcttaggaatatatatatcctgccagacatggtcatcccagcactttgaggccaggagttcaagaccagcctggaaaacacagcaaaaccctgtctcctgtctctaccaaaaatacagtaatacaatagtaggatatacttcctagtataccctaggaagactgttaagttatagatagtcattttttagccaaagatgtattataatgaatatgattataaaaatttagattctcttatattaatattgtaagacagagtggttgacttctcaatgttggagcaagcagaatctatcctcccctgcttttgatgttcaatagtgacaagtagaggtcacacgcagtctctgctgctggcattcctggcatggtcacagtgactactgtgacttgtttgagaggtgactttgaacatttattttactttcaggttagataatttagtcattgtattggcttgggctagtgaatctttgttacaacagccaataggatatatgaagtagtgttttaaaaaattagccattaaagacagttttcaatttgcaaaccatttctaacatgttttccatggtaagaattagctacacggaatgatactgggaaatatagaaaaatggggggtactggaactagctaaaattttacagattacaggtataattgttttgctggtcacacatgattatttctattggttacattttatttggacttgtattgtgatacattgttctatagaaacaaactatgccttaactttgttgtgatgatctaaaacagttggaaactgagcctgatgtattaaaagagagtacaggaggccatggtttgccgcagtgggcattgtgtgaagataagggactgaagaaggtgtttatagatatgaaatgctaatgcatgctcattcaaaaaatcataaccttgcttgtatttcagatctgtgcaattctatttgtcatttggatggctagtattgtgactcaagtattctagacaagctgtgattaaatatttcaacagaagacctcaaagaattactgatttataattacccacgttacctatgctacaataattagaaataaagaaattgaagtgatgtactgtatagtaatgctactaaacagatatatgtttatatgaaaaggcaaggaatttatgaaggctagtattatgtaaatgactgtctctaaagaattggatgatatattgcattttgttcattgattcaacaaatatttgtctgcccaatacataccaggcactgaccattttctgtaactaacttcatccacttagcactgcgaataatccaataattccccaggacaaatattattattcaataaattaaatgagtatcaatacaggggggtattttacagaaatcactgttctcctgggtaatcaggggatctgccattgagtttggtagcacaaatttttgtatttttccttaagggatgatgaaagatcagtggactcctaactatctgcagtctgtggagtctcaggttgcttagaaactcagcgactatgggcttgctatggcaacccaatttattagtgactgcaaaactaacttagctggcattgtggcaaatctccatattttgctggtaagaatattcagataagttcttctatcatactagtatttatattatttacactattgagctaaatatttatcaaattttgaaaataataaattatgatttataatggtcgagaactacatgaaaatgaagcttaaattctgaatgtatttttagatttccaatttacactgtctgccggttaccaggccattgccttagcttaaatctacagaatgtgatttatgatttgtactatatttaaagcatgagaaaacaaaactagtacagtctattatctatgtgccaataaaaatggtctgcaaatttagctttaatacttctatccaattaatagataaatttatgtatgtatagtataatttaataattttgttttacattacaaacttcatatataattgtaagattttacagtattatgtatttttaaaatcttatgtcttaatataccatgtaatctgatacacaaatgtattagaaaaccactttacttgaaaagtacatttttgcaattgtgggaaagacattagggaacatattctcaacctttgtttgagtatttgttccctgtagtacatttacaaaaattttgccctttctgattttagtcatgcttttaggttctgttgttttacatgctaacgagttctattgttttacactgtatataaactacaatcttctctgtacctcttcatatgtaagtattgcattcatcttatctccctattgattccaactttttgtttttatcacagtcaatagcagaagcagagccagcattctctcctgagacagactattacaaggttctatttactgtccttttctcctgggttttggcatttatgcattttgttttgatacttaagacttcatcatattaaaggttctcttgagattgaaagaatcagtctgactcaggtttttacaggacaatgctacatttgattatattttaaattttttctttatattttatccattgccttgtaattctgcaaatgatgaagttatttttgaatcctctagtacatcagttcaactaggctatgcccctgtggttgacgatatgtctcatctcacagacggaaacaagtacaaagagagaacttaggttattttcttggaattaattctcattggaacagaaaagccaattcccaggggtccttgcttaagcctccaattagtacaccatattgaccccctcccttaaaagaggggctttttttttttcacttagactacagacccactgctctttaacagaataaatgagcagtccagaacactaaacaacccaaaggaatcaaactcttatcaagggatcatgtgtgttagcctttaaggagatagtagattggcatgtaaaaaaaaattaggtggtagagtacaaatattcagaagacttggagaggattttcaacaggcaaaagcaaaacaatacaactatttcatgatacacatttagtgtttaatcatgctttttggtgtgactgaattattttaatacattttacaaaactttattttaatcaatatgtctgtttctgccaatggatacataaacacaactggtacattgcatcatttaaaatatttgggaaaagctcattgtgtagaagcatgtcattcattcttgtattatagttaataaatacctgtgaaagggaagaattaaatccctttataagaatattttctaatgtggaataatcaaactatttacctgtttgctacttgagatttttgcttaaaaaagagtacatctgttctttattccattacatgcatgatgtctattaaacataaaaaaacgcacatctggaaaatcatcagtgcatttaaacttgatcagatactggaataaacaaaggtacttcctctcctacaaaagtatttaacatatacatgcatttcttttaaaaatctatgctgtgatacatagagttactgtttattcagcatcaaataaaaaaaatttgagcacctattaggtatcaggcactatttaaaactctggaatataatgctaaacactaccagcatgattcctggtaatatgttatagggagtttcattgtgacctactctcttgctacttatgaatgaacagatgatgaattgagctattttggaatcctttctataagtggaacactaaaatattctaaagctatataaatgagtaaaatacagtcacatggtatatgtgcttcatgttatattaatatctatatttgttacatagagtgtagaaaaccatattgcagaaacactttttttctcctcctttaagagacctggttaagccatgtttcttgactgcactcatgagctagaagtttgattaagtgttttagtttattaaaaatacctgtgatctaatgcctatgttttaaatagaatcacaaggtatcagcttgggtgctttcaacctgtgaaccccaaatacctaagacagatcccagttaatttaatcccatctacccacggtagtcagagcacagtttggttttatgcattttaggaagacctgagacatcaatcaacatatgtaagatgaacatggattcagtctggaaaggtgagacaacacaaagcaaacacaggacaactcaaagttggcagggggtcccaggtcataggtagataagatacaaatggttgcactcttttgagtttctgactagcttctccaaagaaggcaatcagataagcttttatctcagcgagcagaggaatgactttgaatagaatgggaggcaggtttgccctaagcagttcctagattgactttttcttttagcttagtgattttggggtcccaagatttattctcccttcacaaacctaaattagctgaatcaataggaggacaggtttgcccacagaattgaaaactccagtgttagcactcttccggcacaggtggatcagattgctggctcttcttaactttctctgctctctccttatttggatggtaggtttgacacaggctggctttccttgaggttgtaagagggcctccagcagcatggctgtaggcttcctccttatacataagcagtggggattggaatagagaatagatgatgatagaaaaatcattcccactgctgttcaacaaaggagcacattttcatgagttctgggcaaatgtatgtcctataacactctctatttaattaaatgagaatattaaatagtaccttgacatttttagaggcaataccacattaatagctccacatcaacatatggagaaactttcgaatctttccctctgaacttagtgttaaagggcatctctggaaactaaccagccaagcaagactttctggaaaacaaggtactcctcactacacaagatgaattatagatgtggagttgtgaagtcttgaaatgttgctttctttcctctggaaaatacttaagcatattgaattagcccttagaggttataattcagttaactgagatggctcaattttgtcagatttattcattgttcttcatgtgtagaaatagaagcaaatccctcaacatacaccttaacactcatgtattggattattctaaaataaaaattgcctatttttagtttaaatcttattcacctagattgtctggagactgataaattcaatagtagcctttttttttttttggtatcatgaaaaaaagtattctaggtaattaatttgcatcaaaagacttagaaagaaaaccactgctatatttcttttatttttcacctaacctagatgacatggcagataagccagggaaaaattagtaaatagcacaagtttcatcttcattttttgaattttaatagtttgaagaattaaaatatttaatacttagggtgctaaatgtgaggttaagagactaagtagcagaataaggtttagttttggctgaaatattttttgatgatatttgcagacccatcattgtgtgtcaaactgtcatcggggtggtatgcccatcaaaacaaggatctgttaagtggataaagtgagcacatccttaaaaggagtagaagagctaatgaacttacagtttcttctaatttagagatatttgtgtttttctttgtggaattgtatgaagttgatttggagacagttacaaatttacatacctaaaaccaggtaccattttgaaagaaaattaagataaaaatgagatgtcaaatagccaaaaatcaacagaacagacaaatgtaggataatcaaagaagaaaaaattaagagaaaagtctatactgaaagcttattataaaaatcaatcttttgggatgtgcttctctatagcatgggaagtacttgatgcttttaatttgggattccagaaatggtgtggtttccatgtttttatggatttatttcacctcaaatttttgttcactgcaggctcctttcctcctgcctattttgattacccaattttcccggaggggttgttgaaaatgagaggaaaacaggcctagcaatgatcttggatcaagtccagaaaatgttcttagtccttggaatacattacatggaggatgccactccaagccttgtaaatgcagcttgggaaaataaatacgcttagagtattcactctgaacacgaaagcacagtgtggttaacaacaggagaattgcagagtatgccgaaacatagaaaacataaacatttcagtttagatttattatcttcacccatgaactggggcactgtagaatagaacagtttgcatacctacataacacagctgagagaccttgggctccaaaaaccaacaaaacatcgtgtccgagaagtctctgaggatctaagtgcaaattgagcagtgcaaaagtagcagggctagtggtgtcttttgagagtgacattctgtagcaattaagattccatacctactattgtttacttaattcacaaccccagaatacaaaagaaaagtgacattcagaatctgaaatgggatgatcacagtaaatatgtttgagtccttcgttgtttgctggagaacaatgaggatgatagacactttcataaaggcagggctcatgataactaaacctacataggagagttagaaggatgaaagatttctttctgcataaccacaaggtaaagtattttatcaagtccattgtaactgctccataatgtgaagcaaattttaaatgctgctacttaagtttcagggctaaaatgaagtttaataggtaagttagacttctctattattcaaagtttaaatgtggaaattccaaagtgaaggttttactctactgctgataagtttgcaatttttttttttttatttcaagaagataaccagctatcacaaagacacatacaggacagttgaagggtttcagtgttttagaatgattctgaagttctaagatatttgtcttatgtattatagaatagtagtctgccacttttcattatctgaattctaatattttctagaatatactcatgtaaacatgatataaacaaagtgatttaaataattcataacatttccagaaaaacatttctggaagttttatatatattttatatatatacataaatgatataaataatgtacaaaacacacatatttgtatttgttttttacaaagtattgtataatgctttgttaaaaccaaaaatgcatttagtgtaagatgttcccactgttaattctatagatgcttagaaatcttaagaatatgtgtcaagttattgcaaggtattcatttgagaagtagcactccaaactaaacctgttggtctcttggaagagcttcagaaaactgaagcttgtccgagagcaaaaccttcccttaaggtttttgagaaccaacctggaaaatgatgttatgatttcactataggatttgatagattgttttatattcctttgaaattattagcagaagctgctgtgccactcaagtgcagggtttgtgccaaataattctgtgaagtctcagggcagaatgatcacttctccatttaaaaaaaaaaaaaaacagaacaagaatggtatcacagatgtattatttcctgtgtttcttttaaattatttttgtatgcttcttagaaacttcaccccacaagctttaaaaaaatgtaatcaggcatgcttctgtgttcctggaaaacgtttgtgtgtgtatacacatgcatatctgcatatgtatttcagtcttttaggaagctaatgcccaagtgttctgtatctttaaacttgaggtaacagatgatcagctggtgcagatgtcaatataattttttaaaagatagatttgccagcgtggtttagtgtgtttatttattaaatggaacaaaaaatcattttatgtcatccttcatctgatttctttatatttttctgttttaagatattcatcatgctgatcaattttttatggtttaaacaaaataagaaaaacctaatattttagcattttaaaacacatcattatggccaagcctagagccaatgcaaagttaaattatttctctgaaccttctcaaaattatttattttattttaaagactccactttagggaccacctttttaatccagggctattataatatttctcagaactaaaatttgtggtacccttaatgacaatgaattttttctttctgcccggtaaaaattcaaaattcattaattgctatttttttctcaacgtttaaaaaactaggtgctcatcaactaaatgcttgttttggctatgaattattgatttttttcctgctatttcatcacaccatgctttgagacctagttattcttttgcctaaatgtttctgttttttcctcgaataatttcctatctactctatgaacacagtttacctaactatgctgatcatggcatttccttatgtttcttaccatcatttaaatgttgactaattttttttcctacttagagaattgtttttgcaagctgttcaagtaagaattaggtctgccaacatttttagatggcctgtaaaatttacataatgatttggccatgcccacatgagaactacctacatatacagaagtgctctctttaatctgttacaagcatgacttctattaaacctataggtaagattattttctacttttaatgcagtatgtttgtttttatcctgacttttgattcattaggccatgtggtttaagtctaaactaagttactctgatattcggaatttcacctttaataattttctggaaattttcttttaaaggtgatattagaaatctccatttcagtctcagcatttcactagcattacatgatgctcttgtcttttgcaatttaatattcaaattacatagatattttttattactgcatgtgaagtccttcctcaacttataaagcagttagaacatactaatactttaatacttctataagtgacgagctggcaactgaaaaatgttcatctattatacatatataagcataagtgtgtgtatgcctaaatgtatgtatgtatacatttccatgattagtattccctaaagattaaagtgataaaataaatgttgcctggttttacattggtaactaatgttatgagatagttcataggtcaatagaatgaaattttatgttttatttaatctaaaataattctgttgattgccacctacatatgttcactgttcattttctattgtgtctagacattattttgctcttaatgtaatatcaggttaaaattattcaacttgtgcaaagattttgagaaaaatatgtaaaattagattttgatcaaggataaatgtatctttttttttctttgaagaaaagagtataggcccttcagtcagtcagtttgggttccagcccttgttctgccaagtactagctgtgtgaactcagctagtcatctaaagagcctagtaaggagagatgattattcagcaaggtaatacatgtgaaatacttagctccacacctggcaggtagtaagctcctactatgtgttgactatgttattgtatgatcatcttcattgttctttgctcttcaagtctttgttcacccattcaatctagaattacaatgcaagttatactaaaatgcttcttttcatttgctgaactgttaaaaaaaatcgcttagttttcttttaaatggtatctactactataagatattcttgtatctgcatatagccttacattttaaagtttaaatctactatctgatcttcagcttaaaggtaggtagactttataggttatcccatttaacaagaaaggacaacaggaatacaatgattattacgtcttgcctagttcacaaatcctattgctaataaaggaatcacacgggccatgtgattcctcttccagaactcttgttacccatctgtcatttgcttctcaaatatgttgcaatatttgttactcaacttactgtactcttcctcttttatttcacaagtgttacattccatgaatcagcttgtccaaaagtactgttaaaaggattttttttaactatacaaatgctaaaagaaagtttattttttttttagtatgctcaaagtggataaaggctttcaaagcatgatacaatcctcaaaaggaaatgactcaaagtttatggaataaaaatgtaaacatttctgtaagttacacatacaaacagaaaagtaaaaattgtcaaattaaaaaaaaattgtcaaatgtccaaagactattttcctactaattattaagaaagggacaaagcaatttatggaaaaaaaggtgaaaaggatattgttacaaatgttttaaaataaaaatggctaatatactttagaaaattataaaattactgggggaaggttaacacacacttaacatttgttacttctgaggaatacaattggggattgaggcctctcattgtacacttttctataattttcaatattgctttctctccatacttaatacattttctaaaataaaattgtgcgtgatagccagtgatggccatgcaattatttgttgttgtttttgttttttgagacagagtctcactctattgcccaggctggagtatagtggcacaatcttagctcactgcaaacctccgcctcccaggttcaagcgattttcctgtctcagcctcctgagtagttgggattacaggcatgcaccaccacacctggctaatttttgtatttttagtagagaggaggtttcaccatgttggtcaagctactctcgaactcctgacctcaagtgatccgcccacctcagcctcccaaagtgctgggattacaggtgtgagccaccaagcccagccacaattatttgttaaacaaaaactatgtcaggctctgtgctaaatccttcatattatcacttttaatcttgacagcaattctgtgagggagatatttctaccatgtttaagagaggtaaagtagttagcaataagtcatacacttaggaagtgatgaattccaaattcagactcggattccattcattttcctagcagatgttcttaatctgaatcaaaccattacatatccatggtatgaagaagcagcataatagtctctcatttccactcattctcactacttgtaaagcattatgatggttataatagtcttgtgtgtgtctgtttattcaacttattaccaactatgagcttattctgtactataggggttcagtggtgaattaaacagacaagcatccccctcctcaaaaacgcaacattctagcaagtgcaaaggcaggtgcaaagttcagtggtgaattaaacagacaagcatccccctctgcaaaaacccaacattctagcaggtgcaaagacagggcaaaaacaaaagtcaattggcagaatttcttcgatggtgataagtgacctgtggaaaataaagcagagaacggagaggggaggaggcttgtaggaagtgggggtgatgaaatggggagtgttgagtgcctagaaattttcaggctcctgtcaagtattgtacactactcatctcttagctcttattattactcttttatttagttttctctattctttgattatgaaaatgagagcaatgaatgttaattaacttgattatggcaatcattttacagtgtatacacatgtcaaaatgattcataccttgataaatctggaaaaagaagaacaagcagttaacttccaattacaagtcaatataactagggcccggtagcctgaggatttaaacttacatccttccaatttctaaccctatgtgatctcttgcaaaaaaaaaaaaaaaagaatttccaaagaattgtctaaactgactgaagtagattgaaaattatatcctgtcattctaataaattaatccagtgttatagtggatttacataaagcaaggtatatgctcacataaaacacatcccttcaaaatatggtgggtgcatagtctttaaaaaaatgaaaaccccaacactctttactttaaaatgggtacagcattttgctatgttattgtttaaggtctatatttttctaaaaatccacagttgcagatttgactcagctgtgtgctttcagatcttgtatgctaagctactcaggaactgttgtctatgggattgaacacttaacagctgtctctgggaatgtaaatttgattctttggactgctcatgggactctgtgacattttcctctccagtgacagcagatttgaatggcattaggctactgattaaataatacccaagtaagtttaatgtcaacttaggcatctattttgcatgtattttttctgaaataatctttctctaattgcgatcatattttcattatactttagtcttttaatatctttaaaatatgctcttttaaacaggtcttatctgaaccctttcgttggtaatctttttctgaattgtcatattagagtgtgagtgtgtgagaattaaggttgagaaataaattagcttaaatacaaaacagctatctacaaaatagatattcttaaccaaaataatatgtctttatactaccattttatatcgtgccaccaagataaaaggtcgcagttatttaagggaattaccttcttaagtttcatgaaatcactgtgagttattcttttctaactgaaagcataaattataaagagattgcacatggtcatttctactttatcctaattaagtggtctgagatttgaaaaaaaagtaatagacttacaatatttttatgacttattttttaaataaatatgtcagtaaaaacttccctggggaaaaaaaattcttgaggagaaaagagtgtttggggttttttttttcagttgtatggcactgcttgcaaatgaaaggattcgttgtgtgcctcacatgcccaaaaaggacagcacgagcattctaacttaaggactggtttaaatatgacctaatgaactaaatatatttctgtctggtattcttaggttactttacttctaaggttgtttgaatgcatttatccagctctcctatcaaatacatgccaggttaaccctgtgaaggttttcctgtatgattctgagaatttctttataagaacagggtcttgatagtgaaggttctttccccaaagtgcaaggccttctattttgattcaatatcaacataatgctttttttttttttgaaagtgacttaagtactaaagattatcctcaatagtaattctacttagacatattttggttgaagaaatttaaagagtttattttttgtaggagcactgtgctgtgatcatgaaatttttgcaaaactaacagaaaatgataaacagttaagaacttccagctagaacaataggctgtttcctttttttaagtcagtttgtcatccttgctgattgacagtctccaattgttttcagaattattagtctcacagtatttcagaattacgctgtataaaaaagtacattaaatttaaacttaataaaataagtttcgcaagctcagtcaagacagggaagtgagaatatgattattcttccaaatttactatttccaccagcggtctcagttcagcatctgagaatatgttaggggaaactcagcaagtcagttccttttgtttttctggcctctgacttacttggatgggaaatagccaaaaaaaaaaaaaatgctgaatatctcagatataggtaatgggtcttcaccagaacataaaaatagacccttattagccatatcagtaatgtgctgtgtgggggattttttttttctttcaattcctctggcaacaaaccacacactgggatctgacactgtagagtgctttctcttctctttttttgggggggggagggggtgtggttgcatatttaaactctcacgcatttatgtactgaggactgcagtgtaggactttcctgcagaataccatttgatcctattaagaattgtccaaatgttggagcatttgattgaaaaatccttcttagccattttaaaggtaagttgtatgatttttctttaaataaaaaagattaagggatttttcccatcacccagatgacgggaggtgacactactgtataaatactcctaagaagttatataggaggacaggaaaaaaggtagtaactgttttcttagtcactaggctttatctaaaaatcaggtttgcattattttcaagttatcaaccttcctatattttatgcttaaaccatacccaatggcatttcatgtcgtatgtataagttaatatttaaagtgatttataatccaatttggattattataaaactttcattttatacttaggctatttatacatgatgtttaaatgatgaagatcattatactgcagaccaatataatgaggttagatgttataaatgacttacagctcttatgtcaacatgttgtctaatatgcaattattaactattactttacagagtcattagcttgtttaattttcaatctgaattgcacaacttttggtatacctgacttgctctacatgatcaaatgcaatgtgtattttggatatgtgctttttaagttcttttctgtaatgaacaaagatattgtcattgttactgggaatagcaaagtatattacttttaaataatctgaaatttaattagtgtaaattagtagaataaaaataaagttaattttttttcgattcaggaagcttattacaaatagtactgaattattagatgatgatgccaagttgaagtaaaggagaaatcaatttggaggaattaagtaaaagcctcaaattaattatacattaactaaaattataaataactgtaaatggcataaattctctagagtacatcccagtttctgaaatcatcaagtagcatattgaaacctgttttgtaaagatttgcatgtactttttagtctttttctgtgtggtttgaagtcagtaatgtgtgttgaagctaaaaaatattgctttaaatattggttcacaaggaagccaaaatgaaatatttaaaaatgtttgttatatagaaagtccagtggtcctttggaatttacaagaaaataagaactaaagtagaaatcatttaatttcccagactcattagtgaaccagaacaataaaccaaacagagaaccatcagataatgggttagcctgggaagaatattaattacaactggaggtacttgcacagagtgtactgaatttggaatttaccttggaagttatagttgccaccctatttttttaaggaatttttttaaccttgtttactttaacacatttgaaccctgcatgtgtgtgtatttcctgtgtgtttcctgaaaaggaaagtttaagataattctgtaactatcagatacttaattctgtaagtatccttgcatctaatcagaagatgtttttgttcactggcccaagatgtgtctgaaacttgcaagtagcattgttctaaactagtagctgtctttccatttgcatattttaattccatacatatatgatcacatttcattataatctaactattttgcaaatactcatttctacttttgtaaaatatacacatttattagatttttaaaacacttggccaatatgaaataacactttactgttatggtttgaaatgatacttcatagtaatatttcaaaataacaataacattttctacaatataaatatatattattttacttcatttaatacttgcaaccttatttgatgtaagtaaactcattttagagaaaactgtatcacagacaaacttcaatactaacacccagaactgaatctacatttcttggcttcaaggtccagcatttttggcattacaaactttatagtgtctgtttatagtagaatttggggtgtggaaaaaagacattagcattcttgtctaaggttcaaaaattaagaatgggtctagataatactctttaagtcagtatgaacttaagggaataatttcaaacctacagtaatccctggttcataagtctttaaaagacgggacttgtttctagaaggatcccaagtataatatataaagtccaatgtatttattgcattagtttttaaagactaccatcaaaacaagttacaaattgcaatatttgagaagtatgtaattattttatattacagatgtctatcaagttttttcctattttacatttttaccatcatatattctgataggatagaaatggacatgagataatttcagtaagataagattctggagatctcatagtccagttatttgaaaattacttgtggagcccatgggttctttggagatgactcagagcccaagtgaagcgtgactgggaaagggaagaggcacagtttctgctcctttcttttaccaaataactcttctttgaactatcttttatattggtattgtgcataaaatttaccttgaaaggagaattctatctctaaacatgattttataaagaatgacctaatgaccttatgttgatgaaacataatcatagttaaatgattgttttacacccatttctactaccttgaatttgaatctacatttttactcatgtatagggaactgtgtctttataaacatacatagttatgataatgtgaaaaaagtaattttaaaaactaacttctatactcatgcaaaccgttgaatgaattcccccaagtcctccaaaaactagattttatggacagatgctgtattttttaggtaaggaaaactctctgtatcaagagaatggaaaacaagagtgtggtctggttttctatcctaagaaaaagtgggaggaaggcttatagatagaaaaaaaagaaattttagcaatctactgatcagtaagaaaatgtcatttaggtctggcaagtgtctatggtacaagtaccctggaaatctaaaacttttcaaatttcatagtttacatcccagcagatgttacttcagggccatgccttttctgggtggagtttccaagggaacacagctttataaacacaagggattaattatagatgctctggggacttgctctaatgttctaaactgtttactgaagaggcttcttatatctcagtctaatgcaggctttgcaaaaagcttagtctctgtttctactgggttcccaatatagtgggagggtattttgcttaaaagttcattacagaaacactgttgacctgataaccaaaaaaaaaaaaaagttatatttttcctccctctttcaaagatgacccaacggaatagggtccactcatgaattctacaaaaggaataggatttataatctataaactggacagaaggcaactgagctgcctatagaatcaagaaaggcatgtaattagttgcctattaaaacacgtcttcttattttccctttcttctttatacaagtctcaattagttttctgtatcttggctttctaaatttaagtattttaagcaggaagtaaattattaccgatacagtatcaatatcttgtctgtttcttataaaggacaagtaacaattagtaaagaataaaatttaatctacaattagcaaatgaaattaattacctattttcatatataaggagttgtgttattaagaaaactgagtaagcataacccaaatttttttatgctttagacagctaaatttggtggaatggtggagacaaactacattctttctctgaagataaatataggtggaaaagctgtgtgactacatgtgctatttaacatgaacttttctcttttgtatttggtgcacgtcttacgtagtatgggtggttctcctttgcctcaggtgaataaaactaattataattttgtcatatgcagcttaaggatagagtatgattataataacaatacttcattactcatggtgtcaaggcaccgagtgataataaatgaacccaactagtgtcacgtattttgcctattcttaggaaaaaggtagaaacttaaagtaataagaggcaatcaatcagttgaaaatttgaacaaatagacaagttcagtttgtctagctcttttttcaaaatatcagcacatggattgaagttttgttagattaatacttgtaattttgcttgtatatcatcctgaccaatgttagattgagaactgtctaaccatagaattcaacagaataaattacttgatacttctgttttctaatgtatgtgactctacagcagtgggatgtgtacactatctcacttcagttttaagttcaaagcagacagagctaggcagtacccaggcctgtccattgctcaacatatctaggctcagagtccatagaagttatactaatcagttttcaggtctagagagggagccattggagcgcatgcactactccctggtttcttcagtggttactgttggaactctttaccccttgcagaaactcttctctgtagtgcatggagctacttgattgaataaagaagaatgatttgggaaaaggccagatagattcacaactaggttgtggcatagaatctggagaagggctaatatatgcacatatacctattctaacagcaatagagttataattttaaatcattttgtatcacatttgtcagagttgcaaatgacattaatattgaatgagtaatttttagtgaagtttatgtggaacataaaataacttttccagagagataacttaatccttgagttatacatgttttaaatagattttcatactatattaacaaaactggaatgtgacactgggggtttcctgctgcattttttatgtgggctcataaagctgtgggtttctacagaggttctcctagagcttcctaacagtgaggataaagagtgtcaggcaggaacaggaagacaaagttaagaaacagagtctctgggtttcttaactgctgtggaatcagtcattttacctaatgcacttccacgtaagaattgaaaaaccagttcagccgcttaaattaaaaaatgctgatctcattttatcatctcattttacgcatgaggaaattgaggtgtagagagattatgtggcttgtctgctttcatttagcaagacagtgacaaatcagtctttggtttaatcttgtcccttcatctcaattgaaccagctgggatcgctatattttaattgcttcgttaagtataacttgcagaaaatatttggggatggtctatgaaatgggcattcaataaaatattatgtacctaataaactaccctaaatctcattatcagttcacaacatacagaacaccagcatgacattctctagttggcgattactgtggttgcttaaaagatggtttcaagaaaagtttcaagtgctttacaattatgcattgcaaaggaaattctatttgacaatatccagtcctgattaccagcattaaattactcattccattgcattaggacagccatggacaaagccatatgaggtagcatggtatacgatttccaagggcagggaaagctattgttaccactccaccctgaacaattaataaaaagccagccctacttgctcagtgagacagaaaattccacaggaaaaacaaatcacttgtttagacttatgtgcattccctttacattggagaaaaatgacactaaagaactagtcagtcttcttaatcaccaagaccttgatgtaaatgaagtttattgcatcctatggtttatactggaaagtatcctatgtataagggaataggcaaaggggaatcccaaaggttaagggaacatatgtaaataataaaattgccaagaaaaatatttgtaacatttattcctacattttgggggaaaatatcattttcttattcttttcttagctctacaggtaatatttttgaaaaactatatgattactaaagtggaagtaaatactaataaaatcataagagtggtacctctgttgcaagacagctgtggagggaaaacctgaaattataacaaaccacaattattaatacacttacaacattaacaacaatattctatgtgcccttttttgactgtagccttcattccgttggcacatatgttttctttggccatgagcatttcaaagtagagaataattgtttataaactataaagcgcattctgactataaatgacacgccaaccccattattgacaaaatgtcattgcaacaacaaagaagttcaaataaatgtgttttcaaatactagttagaattaactctgattattacagtaggatccactcatttcacaaactgtattctttcttccaatctttttttttttttttgagatggagtttcactcttgttgcccaggctggagtgcaatggcatgatctcggctcaccgcaacctccgcctcctgggttcaagcgattctcctgcctcagcctccggagtagctgggattacaagcatgtgccaccaagcccggctaactttgtatgtttagtagagatggggtttctctgtgttggtcgggctggtctcaaactcccaacctcaggtgatccacccgcctcagccttccaaagtgctaggatgacaggtgtgagccaccacgcccggctctcccaatctttatataataatcacatactatggctgggcatggtggctcacgcctgtcatcccagcactttgggaggctgaggtgggtggatcacgaggtcaggagttcgagaccagcctgaccaacatggtgaaaccccatctctactgaaaatacaaaaattaaccaggcatggtggcgtgcacctgtaatcccagctacacaggaggctgagtcaggagaattgcttgaacccaggaggcagaggttgcagtgagccgagatcgtgccactgcactccagcctgggtgacagagaaagactccgtctcaaaaaataataataatcacatactttatgaagacaccaaacattagattgacaaatatatactaacacaaactacctaattttaacagaattagcatgaatcaactgcaaatgacaaactatattgtagttgaatgtgtagggaaaaaattcttcagtaagagagcaatgccatggttgaaacaagacatcctctacattttatatttgcttcaaattctttatacctgtagtctatccaaagtcatcaataaaactgaaagtaagatactcttattttaaaaattccatgttttaaacagtttttaggacaagccattcaggcctgaactcagtattcatgaaaattagactttcttttaacagttattttaagtatggtgatattagagagtgtcccagtataaaatttctgagaatttttttctatttacccatgcttttcttattttcacagatagctttccaatgattagacgaattgattctttctgtgactcatcagttcatttcctgtaaaattcatgtcttgctgttgatttgtgaataaggtatcgtaaataaaacatctgttaccatacttgcttatcatttaatggaaaacacatcagtcaacccacattctgttcgcaggagagctccagaaggggtgtggaaggttgtgttgggtggagaaaccagatagtgaggatgcaactaagttgctgagacaagggaagagagatgagggtgagagttctccttagataagatttcaatatgttaatcatgtgtagaaagaaaattaaaaaggaggaatatgaagaaattcagatatgacattattagttctgccactggtaggcattagaagcaagaaaagggagacggaccgaggaagccactttggtgaaacaaaaagaaaagcatttgtttatttagaacgggcaaaatgatacgtttcagtgggtgttttctttgtactttgatctttttgtactgatatttaagcttctgttttatgatctctttctaatgatagaaccagagcttgtagaaaccactttaatcatatccaggagtttgcaagaaacaggtgcttaacactaattcacctcctgaacaagaaaaatgggctgtgaccggaactgtgggctcatcgctggggctgtcattggtgctgtcctggctgtgtttggaggtattctaatgccagttggagacctgcttatccagaagacaattaaaaaggtacaagtagtccaaagaatatgccttctcattttgattgattctaacttctctttttttgctttgtatttacctgctttatatttcatggtaactgctaattttgtatctttgacataaaggtaattatgaaccactgcaactctatatgatgcgactttatgtgaaatgttataagtataatgtatatttaacatgactccattgctgtcttaaatataaataccaaattctattaaaagctgtctacaggtatgcatgttagtagaaataattgttttaagttatgtccaaagagcatgttggcatgcttttgagtaggaaataagtgagtatattttgtaaaagcacatttataaaagaagttgcactttagttaatactgagaaaagtaaaactgtgtgtgtgtgtgtgtgtgtgtgtaatgtgtttaatattgaaacataaatccttattaaattgtaggtaaacttgtttggtaatacactgtttagtaatccactatttttatatatgtgtaataatctcatctcataaatattttctatttgtgaagcttcatattggaatcttagaaaatactttcagaaatatgcagaacatgtcttagtataaaacaaattgactgtagtgtgaaaaaacagaatgattgaatagatgggctttgcacaacaacctagaattcatctcccaccctagcttattcgaattagctacacactcactcatcagaaacgttgattgatagggggaagaagagaataaagggaagcagttctgctgaagttctaaatcagggatggcaaattcaaatggctgcaggagtttggatacaggggttaaacaaaatttaaggtgccaagaacaagataaaatgaagaacaggaactgctgtgaactagactgtgtgtttactgcctgaaggcataaatgttcattttattaaacataatactggccaaataaaacgagttctgccttcaactctctacctggttaggatggcaatgacctagacaaagggttagtaagcatagtgcacgatggagaacaggaggaattgaatttttattaaatttttattgctatattgttagtatttttaatatttttgatccacagttggttgaatctgcagatgtggaacccatgaatacagagggctgactgtattgtgtttattgctaacatattgcagaacttcagcctcatgcatttaactgaaaaaacatatgtaaattagtatcccctgccttggaattcttagttttcttgatagtatttttaatacaggccaatggaaacagacaggtaatagtgaggtgtggggcttatctaatagtgggatggagtggccattgatctgacatccttcctactcataaactatgttctcacccagatcttatgcagagaaagtacaagatcagtgtctgtgttaacgtacagactacaacatcatttggaaaagttttccaaattcaaaaatcacaataatcttccaatgcacagcgatttagactacttttttttgctgacacataattattggtcaataactgagtattgatgatttaatttttttctttgtcatgcaacaaaactggtacatgtagattcttttgaatagcatgtgaggtgctagcatttattttaattctttaatatttatctttatgcttataatagttaaccatgagaaagtaagttttctgacatcaaaatgtgcttttgtataatgactaagagaataatataatctcatctattgtaagctataaccaggggaagatatattataataaaaaataccgagacctatgagactctagaattgaattggaaaagtaaatgctgtaatactttgaaagagaaatctctcagagtattcaagaaacttcaggaaaaaggtaggacttgattcagattttaaagaagtgtagaattttgaaagtctcaaataactgcagtaaccatattaaaggactgattgatagtatgaaaaaccctgtgaaaatgctaccaaatgcagtgaagatggaaggaagaaggtagagaatgtgcccataatactggattaacagcagaaaagattagaagttaacatggggttagagttaggaagcaagcttagaacatcaggcagaaaaatacttaattgatgatacaatacacaatagtcgtcggtatgtttttcagcaagtgtaagatatgataaaacctgaatttagagattagatggctaacatttaattcttactaagagtttcctatatactagttcacttaatcttcaaaaatatctgtgagaagttgctgttattttactcatcttacaggcgcaagtccttaaatcaacttgccaactcacctagccaatagggaaagaagtcattctccaaatgtaagcaatctgtaggaagagcctagatgaaaaacctggccttgtatactactctacagcagaaaggttgcaaagtgaggataccagagataggaaaacaaacaaacaaaaaactgtaggatatgaccactttcaaggagaatataagattcccttttagaaagatatttgcataatctgcacattatataacaaaaggcacactggtctggcatggttgagtatatagaaaaaaaaaactgatagataataggatgaaatggaagcttggagagacagattaaattagaggagtaaaagcatcaaactcaagatgtccagtgagttattgatagaaggtatgtatataccttacaaagtaaaacagaggttttataagtgatgttttatgaacatcagtctgtgtttcaaaggtcagagttcaaatagatttgatcattgctataaagattaaaaataaaactaaacagtagatttacttttagagagttttaatggagagaggaaaaagcagaagaattattacagaatttgtaataattcagaggcaggaagacaaaagtagaaaaggaaaagaatgatcttatatgaagaaacaaacaaagagtacaatcctagaagttaataggaggccagaactcaaggaaagaaagcataaaatgttctcaggcagatgaaaattaagaaaataatgattagaacatggtcaccaataattttgaaagtatactttgagtagggtaataaagaagggggaattaaatcaatggagtgcttttccttcttgtttttgaaataagaattatccgtgcaatcttttacaaggaaaagagaagattcagacttcctagtgtagattcaaactcaaggaggtggtacaacagagactcataaaaactgtcaaatgacagtgcacattgtaagccccctacatgtccatagactaagactcatcatcagaatccttatattggtcaagatgtatggtacatttaaggctaagcttctttttgctctcagattcctacacaaccatgttgaccttgttaatttagtcatatgaagtaggtggaatattgtttgaatagactgtttcttttttcttcagtttacagactattttttaaatgatattggcgtatgtatatctttggcatagagtaggagtcaaatatttgaattttgtgtaaacctagagagccaagtgtcttactgctgcctcagaaatacttagagtaatgctatttcacaaacatatgggttttggtactgttgacttcttatttgtgtaccattaaaactcatttaatattactttgtttagctgactaatagcaaattaagaaagctattgtatacaagtgatatttggaaaaaaataattaaacttcttaattgagaatgatgagaaaatcatttcatatttagtgtagagttgcagtgctgtgataccttccaattctgaaagatgtcattaccatttgaagtagtctaaaacagtttagcaagcttatttgtactttatttttgctctttattttcaagggatgtctctggtatcctcatgctttttatggattatagctgcaatctttcttaccagtatttttgaccgtgattcttaatagagttgtgtgcagccagcaagtttatgcagtctttcaaaaaaaaaaaaaaaactaaaaatcaatagcaagagctgccatgaaagtagaaactaccaaagcactgtggaaaagggtcaaaattctaccaccatttacaaaagataatttatcacttgacattattaatgtcagttgataaaaagtttagtgaatattgtataacataacataggtagttgtatgctaagcagattaatgcaggaacagaaaaccagataccacatgttctcacttgtaagtaggagctaaatattgaatacacgtggatataaagaagggaacaatagacacctggggctaatcgagggtgggaagggggaggagagcggaggatcaaaaaactacctatcaggtactatgcttattacctgcgtgaagaaataatccgtacaccaaacctccatgacacacaatttacctatataacaaacttgcacatgtacctctgaccctaaaataaaagttggaagaaaaaaataaaatttaaataagttctatagttctaactatagaacaccaaaaaaggaattataggtttctttgttcctgttagagaactaatattaaatatcatcattcaattataccatttttccttctcccattcttgaaaacaatgatccttctgtagcttgtaagaaatgccttcagacaaaataaattgaaatcatgattcattaaaatggttatacatggctgggcatggtggctcatgcctataatcctagtacttcgggaggctgagacgggtggatcacttgagctcaggagtttgagaccagcctgggcaacatggcaaaaccccatctctacgaataatacaaaaaaattagctggatatggttacacatgcctgtagtcctagcttttgtggggctgaagtgggaggatcccttgagcccaggaggttgaggctgcagtgagctaaggtcgcgcctctgtacttcagcctgggtgacaaagtgagaccctgtctccccccgcaaaaaattatgtttgaattaatagtccatattttaaacatataatttgtttatattacctttataatgtatgcttctagtatttccagatataataaaataatttgtactttttcatagtatctaaaagctcaaaaataaatgactaaaaatattaaagatggtaaagtttgttttatatttaataacgtaagaacaacccaaaatatttaaattaaaatagcagtataaaaacgaattaaacactatgtatatgtgcatatagctgtaataacaaatgtcacttaaagacaatgtttcaagaaatagacaagcatatatgtttcttctactagtccaatttaatatcaacatagtttacttttcatgccaaacacaacatagtttacttttcataccattttaggtacttacataaattcttggaggctaatttctaggtttcagaaacatattaaagcttactactccaatacatttcacctaattttattctgggttttagttgatgatgatgttctgaaactaaagccattttcagattctctgcataactgtcactacaattctaattcattctcaacttacacacacttgcataatgcaaaaacattagaatttcttttaacatggggaaatgattcgttttaggcccaattacaagcaaatggtagcagctagtgggaaggatggaagtatgcttctggtttttaagaaagtttttactttactagaaagagaaatattaaaatgattaaataacagaaaaataattgtcacaggatattatataagttattggcacatgactggcttagacagtaaatgctatgaaccaagcaattaaagcagaatggagaagtaaatggtattagagttcttcctctaaaggatggatagaatttgtaaaatactaatagctgacatttattgaatgtctggtttgtactaacactgttctaagtgttcacgtttattgatccccataacaacctatgaggataaatatttaagccacatgaaaatgccaaaattcaactttttttgattttcaaaaatactaagtctatatggttcaatctaacattactgttataatttcacagataaggaaagtgaggtacaaagaaattaaataatctgctcaaacttcaatgatgatgattattattaagtgatcaaactcatagcatctaatttcattgttggccacttcagtctatgctttagggaagaagccactataccttgttagggtggggatagggtaaaaaaatctaactcgtagattaaaatctgctaaacatacttctgtctcttggtagaaatgtgtaaagtccttgaaaagtgaaacaaaatattttctacatttgtactctactccatgcgtagcaaagtatgaagggcattttaataatgaaagttgtcagttatgtagatgattattgctgttgcatgaaaacagtattcaagtgagtgcatgactacatataggatattaaggtcccaacaagcatctgttttcaaattaatgtagcagaatagaagtttcaaggtcagtgctttcaacccagctatagaacatgctatgtgagagtcaccaggttgaaatccagttgttgttggggcttggtagtctgcatgcttagagtcagggacaaatacacacatacacattagccaagtgagaaaatcttatatcactttttctgtgtacatacttaccagctttgtacttcaaatttagtaaaatatttgcaaaatagtctagacagtccaaattcaatttaaaatcaagttcttttaaattcacaaaggacataacatcttttgtttcttgtgacatatttagtcttggtattcaaggagtgactacaatttaatacatatagtagtggtagcgtcagaagcatattattactacttcgactacttcaatatttttctctatgtctctaaacaaatcatgatgctatggaaactatataaaattgaagtgaaaggacctgatttttctattatctgctagtaaatttgtcacataacattgagtcagacatctcttttctctagaacccattttccacctctaaaaaaatggacggggttagatagtcctgattctaacagttgataattcaacacattcatttcaaccctgtgtttcacgtttgccttatttgtcgctagagatattttttaagggaaaagtgatttgtggcctttagaaaaaaaggtctcatacacgtacaatgtcttttggtgtttagatggacactcattgtagagttaggaaggcattcaatcctgtcaagcacattctgtcacagactctcttcaattctataagagtttgttgagtttctttcattaagagatattaggtcggtacaaaagtaattgtgatttttgtcattaaaatcgcaaaaaccgtaattacttgtgtacaaacctaatatgtaccttgagaggcacttgatgaataacaggtattgtttttgagcattaagattctaatagtgtgaggagaataatgtttgtgtttgtgtgttctcccttgttaagtctcttgaaatggagaaatcaaccgttttcagcttctatttagctttgagcttcaacatcctcaccaaacatatttacatttagaagaatatccataatgctttaagcaattttgtcttaatattagacttagtatggaaataagcctttttgggagcaaataaaaagtttttcaaggacaatttgttgtaaaaagtaataaagattccatcactctagcaggtccaatgtaccccgtataagtggattacagcagcgtaggattttgaaattccattttaacttggtgcccagttcttctctaaggaattcgcttattccctacattaagcaataagtaaaatatcatgaagatatgaaacttaatttgacttctaccaactaagtgcagagggtgacggaaaaaaaaaaaaaaaagacagtcatagcatggtgtaaaggaggactagtctaagggtcatggatgaggatttttgtcatgaattcactactgtttgcctaggctgtccttgggccagccacctggtttctcagagcctcagtgtgatccactggaaaatgtgatcatgttcaatgtcctttcctaatctgtcattctgtgaagtggtgcttccaggtcaaggaaacaaataggtcagaatgttcctgtggtcattgttctctttaggctcattttccatgaaatagttgtattcctcttcctgtagcacactcaggttaagttggagctctttaacctgggcattcttcccaatacttcattagaaataccgcctgcttcaaaatcacctttgtttgcactatctactacagcgtaatagacttctggctcagagagtgaaagctgtggaagaaaactagaagaatatttatgttaactcccttattttacagctaatgaagttgaccctagggaggtttgatgactctccacccagtcccaaagctcctaaagcaaggaatcgagttcctaatgtaggatttttaattctcttattggtgtattttccacttgtctatctttaccaaaggagcatcagtgatttttagtggatttcacaaaggagtaataggacagcttccttgtcctgtttttttctttaaaaactacaacccaataatgatgagtgaggctgttgtaatttttggaaacatgataatgggttgttgcaaatatattgaaagttaggggctgtgtgcagtggctcacacctgtaattccagccttttgggagtccaggtcaggtggattgcttcagctcaggagttcaaggtcagcctgaccaatatggtgaaatcctgtttctactaaaactacaaaaactaggtgggcatggtggcacaggtgagaggatcacttgagcctgggaggtcaaggctgcaaggagccaagattgtaccactgtactccagcctgggtgacagagcaatatcttgtctcaaaaaaaaaaaaaagaaaagaaaaagaaaaaggttagggaagccagattgagcaggattttgaagacacggtgtcaaatttgtgttcttcatgtagatatttttattttcttaatgtagtgagtgttaagtaccatcctctgaagtgtccaactcttgaaggaaaagaaaaagcttccaataccattagatttttcactcagtttttgtgttttgtttcatcagtccaacttaggggcagagaagaagttcaactcagtaagaacttttttgaacttcggtaaaatttgcttaataaattatgttgactgttgcaatattttcaaagcgtcactctaaagcttgccgaagggtcactttaaagtttgccttaaaatcaacagtcgtgtcttcagtattacacactgattctctttgtaaaaggctaaaaagactgctgtaataataatttgttgaaaacatttctgctgcaagtgtatggtaaggttgcaaaggttctcatgaatgaggtacttgggcttggtccttttattctggctgactcaaggctgcaaacaatcttccagaagtgcctgtacttactacaaagacataacccaaacttattttctttttcatagcaagttgtcctcgaagaaggtacaattgcttttaaaaattgggttaaaacaggcacagaagtttacagacagttttggatctttgatgtgcaaaatccacaggaagtgatgatgaacagcagcaacattcaagttaagcaaagaggtccttatacgtacaggtgagtgagtccccacaaatatgagacactcttaccttgaccatgtatttctgagaagtcttctacttggcaaatgtcattgtattgaaatgtacttattattttcttgccaaaaatatactttaaaatatttttcctgtctgtatagaatcctaatctaagaatttaatgattataaggtatttattttgaaaaaagtggaagatatatacattatccaaatatttattagacaatatatagaaaagataaacagattttattataaacttaccagtatcaaataacttccctatgtttatgaagttagtgttttgttattgtggcatatattctcaacaactctgaaatattcctgctgaggaaaaaaaaatcagttttcacatcttaaaatttaaagcatattttaacagtggttctcaaagtgtagctgggccacagcaaagtgctgggccagctgcatcagcattaacagggaattgggaaacatgcaaatccctccaccccatcccagaccaaatgaatgaaagagttgaggcccactaaagagttttacaaatcctgggtgatttgaatacacaattttgagaaccaccgtgctaaattcatttttcctaactgcggtacctactcaagatttatattcaaattaacttctgggtcatatagatgtttacattgatctattttagtttcactcttatatttcctctagtgttgagacaatattttatatctttcctctgccttccctgatagtttaacacacttttgaacagaatcttagagtattagaactagaggaaatgatcagccagaatctgtcattttgtgagttaaaaatgcctgatccagtggatgtgaggtcacttgtccatgttcacacagatgtaggtactggtagctcctagatttttgtataccttttcttccatttcaattatagacactctgtctttttcactaaaaagggaaaaaagggggagattgaggtgccaaaaacactaccttaaccaaggattaggaatatatttatggtatccatatggaaacatagttatgttctgctatagaatttgttacctaaatgtgtattttccctcatggataatcacaactagttatacaccatgattagttctcatcacaaagttttgtatttctaatgattttttataatttgtagttttagcatcttatctgttttggttatcggatgattgtataattttccttcttccccaaagcattactatgcttccagattgaaaattcacacccaaaataaaatgaaataacaggcatggtgagggtggtgcctactaccatagcacatgacatataagccccagagggccttggtgcatgtcctgtcttagcagttttacccgaatcgggtgtctctgtgcgcatctgtgacaattcataattttgtcaatgaagacttagtttttatgggtacaaaaacatcttaccttagaattttcttcatggtcttaaagtttttatattattagcaagagtctatacaagtatcttgttgcaaagaatgttgttaggtgtaccatatatatatacacacatatatatatatgtattcataggtgtatatatacttatgaaaatctagaattcacatatgacctaaggagagtatcagcataattgtttaagaaatagaacctaagtgaactgagtaagtgtgaggaaagaaaatagttgttagaatttgagaactcatcatgattttttttgtttgtttgggggaagttatatttttcacttctgtttttaattttgtttattttttgaggcaaggtcttgttctgtcacccactctagagtgcagtggcacgatcacagttcactgcatcctcaacctcctaggctcaagtgatcctcccacctcagcctcctgagtagctgggaccacaggcgcatgccactatacccagctaatttttatgggttttgttttgtagacaaggtttcgccatgttgctcatgctggcctcaaactcctgggctcaagcaatctatgtgccttggcctcgcaaagtgttgggattacaggtgtgacccaccatgcccgaccatatttttcacttttaaatatattatttgggatatgagaaaacatattattgaaatagttctcctctggtagttgacagctgatctatattttattcttaaagcctttaacctatctctctaagggacaaaaaggggatgtgttagatatatttggtttgcttagagaggcaatggagcaaagactggagaagaacagttgcatttacagctaaattttagaatccataaatagctctttctgtaacaattttaaagggattcctgattatctgtaggtcatcttgtctcagcatgtcaccaaaatagtcttttattgtttgcctgagtgccttaaataatggaaaaacaaccagtaccttttagaaaaaaaattaacactttgatagtgcatgtgttgagctaaacatgctttttcataactaattataccctaaatccatctgacattggaagtatgtgagaatgtccctcctcaaacagaaccacaggctgtatttggccattgtctgctaaagtaagcttgattacactttgacaagatatgacctgaatcaaagcacgaaattgcttgggttgagatcttatgtgtgtttctacctacaccatctctatgaagatgctgtaattccttcagaatattcttagatctgtaattcattttttgagttactttgctttggaaagaatataaaaagtaatcttgagaaaagcataaattccttcccttgaccttataaacaaacacgttccaaaacttccatacagtctaacttttaaacaaaaaattcagtaattatgttccctttttaaaacaacattctaaaggcagggctgttttaaggatttttcttctagtgactgccatctactggtataatgttgtcagtacactttaggtaacgtgacaattatgttgctattgttttaatatatgggcatatttctgaaaattgaagtactttgatttgaaatattagtaatatgcacactaatttaaaatacaattgtcctgagtgctgtttcagatttttatattctttgtgtgtctgcagtacttcaagaatagtagttttaataaaattatattaaaaatatatttctagccaactttgaatcctctttttaaagaatctgagacatttgtttagtaaatacatttactgagaactcattatataccaggcatgatgcttagagatacaaaacactcataaacccctaccctgtaggaatttacatttttattataatggaataaaatgggtttttaaaaaattcagtccaattgcttaagtctttaccttggctatctactcacttcacaggcattcaaatatgacagtgcaattatgatatatatcttatttcttctcagtgaatatcttccacttgtgaaatgtatttttcctgtaataatcacccttcaccgcgttcctaaaatgtagttggtactttgcagcctagatatgttagagtcaggagattagaactagcaaaagtattcaatatacttgaggggctggggaagttagtctataacccttaaaaatggaaattatattcttatctctaattctcattaaagaagtcctgaaaaagggaaaaagcagtgctggataggccttgtattttgatcattctttctaatataagaaaatgtgctctaaatattcccctgctgaagcccctgtactttttcctccttatcctcaggataaagtctcgtttgagtattagatgcaactcttttatgtttgagatcttacttgtttcaataactttatttccactactctcctcacctcttactctgtaatccaaccacactcaaatatctgcatttcccaaaacatattatgttcgttcttatgcatgctaccatctgccgtactttacctaactaaacttgtatttgttacatagaccatttatgtagacttgtactaaaaagtgttttaaccctcacccctaccctgaccattctaaatctggatctggatctgttttgtgttttcccatggagtctccattataacaatattccttctctctcactattttaatttccagtttgccagtttaagaccccttctcgttagtttgctagagaccctggctgatttctcattttaacaccattgcttacatactatctatctggcatattctgtgtgttcaaaaatcatttgttgaatgaatgacatttgagatctaatgttcacatatgacaaatgttttgaattttgtttactgctatttctttagagttcgttttctagccaaggaaaatgtaacccaggacgctgaggacaacacagtctctttcctgcagcccaatggtgccatcttcgaaccttcactatcagttggaacagaggctgacaacttcacagttctcaatctggctgtggcagtgagtagacaaacaacaaagttatctattttaaaatactctagaactcatgtaattaatcctatcattagaattattaggttttacttgtttttccatttttatcaaaacgtattcctatatcattattttgaatggaggcatggtcatttggaaagtgacaaaatcataagaatcgactgcattagaagaccactttatttttttcattattttttgtcgaaacattctctatatttaatttcaattttataacagattacaggaagatgcttaagaaacaagtacaacatttgtttcagtatgtctttaaatgaaagacttttaagtatgtaagcaactatataataaaaggtttccaaacgcagcctgtaagaaatcaggcaaattttactataagcaataaaccattccgagctttccagacagtgtaccagtagctgtaccagtgggcaataacctttaaccaaacaaaaacaaacaaacaaacaaacaaaagcactttgcaatttgttgctgcaaaatggggagaaaaaaagagtatataaacttgatggaatcacaactgtcaatataatttaagggaaaataaagtcgataaggttgatggtgtctattgtttggaaagtcgaattcggctatttgcttggggctctagagaccacaccactgaataaacaaaactctgcagagtctagctatccgccaacagggggtgccgtccaaattcatggcaaataaagggcatttggtgctcaccattcacaacaggcgggcatttatgtggatgaagtacaatttcttcagcaagctcagcaaaaactcttaaggggcaaatatgaactctgcattttaagaaaaatagaaaacggaaacacaaaatcctaaaaagtatatgaaggctctgcattagcacactggcatcaaaccacacatccacagcacatcctaattctatgggaaacaatccttgcttatcggaggtgcatatctaaattcaatagcttaccaatatattcttgggagtaggccaaaaggaaacagaaaacccacattaaaaaaagaagtttcttttcctaaacattttcctgaagctgaaattgaagtggagaggaagtcagttgtcctcgtcgaaatcgtagtcctcctcatcctccccaacctgggacaccggggtcttcaccctggagatgctgtactgagacctgttggagcttgtggccagcatttcatccgcaccattggtcaggtcactggcagagagcctcgtgccgttagacgtggaacctgccgttgtgatgaacacgcctgcaacaattgtctgcgccatttctgtcacgtgtggctccagcgcctttgggaccagacttatggctttttttttttttaagttctgggatacatgtgctgaatgtgcaggattgttacataggtatacatgtgccatggtgctttgctgcacctatcaaaccatcatctaggttttaagccccgtatgccttaatgcattagatatttgagaagaccactttaagtgtatcgttaaataaatagagcttaacttggaatgtcgtcttcttgtggctggcactgaggcaaagaaatgtaatcatctaggaattagacgaattgcattttgagttttggcaggatctggcagtaattttaaagataagctttaaaaagttttgtattaagctcaatattagcatttaatccatttatttgttaaaatctaatattgtattcttgtcttaaacagtgactttgtttttgtaggctgcatcccatatctatcaaaatcaatttgttcaaatgatcctcaattcacttattaacaagtcaaaatcttctatgttccaagtcagaactttgagagaactgttatggggctatagggatccatttttgagtttggttccgtaccctgttactaccacagttggtctgttttatcctgtaagtaccaaatatgaatggcaatattattacattttaatttaattaattcaatggcattggcaaggcataattttataatttagctcattagtcttattgctgatctggagacatatatcctaactttttaaaaagtccacttctcattatagcttcagctttcctagttgggaaattcatctgaatttaacaattaaatttaaacctgaagaatagatttaataaggtttctactcatttataaatacacaattttttttaaattagccggtaagctagtctgtaaatctttgagcactgtttttggcttttatttccctattcacataatcaagtttaataccatatttttatttgttttaaatatactcctcattcctccttttctagacctcttacaattttaatttatatttaaaagttagcctaatgttcacatctcaatactgataaggtaatagacttcattttaatgggatttgtaaataagaatttttagtagtccataatgtcatgaaatggcagcttgaagattaaggaaaatgtgaacttgatggtgtacttgattaccgcttaatgttttgaattacaaataggataagctaactactgaattggaagttggactatgacttcatttggcactatatgtgaatattatgttctctagttcattgttttacttttagatactgttaggattacaaggttatatatcaattataaatgaatgtagaaagccataatgaatcaaattcattctgattttaactcaatactcatagctctttctttggctaatgctttaacttttggatgtctaatttttatcattttagtaaccacttattatcattttagtaaccacttattaatgactgtaacatttagaatacccctagaaatcattgttcttataggtttgttcaatgtccctcacctcaacatagtaagaatagtgatcaaaatgccctcattggcttaattatgacagagtgctagagttcacatcatgtcagcttctgatatgtatcttctttgtcacagcatctagcacttatttctaggcacctttcacaatttttaaggccaataatttaaaaaaatgtattgcagatgtatttcaagtcatttgagtaaccagtgattgagaaatgtgaaagtgagttatgtattgtacaactttgaaaaaatgacttgtagaagtaacattttcccatacatatatttcagtacaacaatactgcagatggagtttataaagttttcaatggaaaagataacataagtaaagttgccataatcgacacatataaaggtaaaaggtaagtattctggtaaaatgtgcatgtatgttactagggtactcttaagcaggaatagtattcatttaacatctcataagacataggcatcaacctatagaacagacctggttataattcagctctggaaactcctgttctgctaggtattaactctttagttgtggtaactggtgagttcacaccagtgcatagctgctgactatcagctccactttaaggtttggttcacctttctgcacaggttatggttgtgttacataaatccccaaagggactattttttcatctctgctacttatccagcattacagtataattattcttacaattagataaccataaatgaaaaggtaaaaaaaaaaaaaacaacacatcaactgattgtgtagtagatggaaactttttttttactttttaaatcgagcatatcgaattccatattccagtggcatgacctaaatgtgtctataaagatggaagcttaatgaatccaggcaactgctttcatgaccttccccctgcaaatagtctttaataattttccatattgataactcagcttttttaactttatcaatgcaaaaatagaatgaatatttcaagtgcagttctacaatgtaaatacaaaatgtgaaaatgaagactttgccaactttaaagtggtaaaataacaaatcagcttcctaagccattatttcctttttttttttctagctccagcctattcacctaaagaatttataatttatcatatatgtaaactaggaagaaccctaataaatatcagaggaacaagctttcttctccataaaattaacaattgtgtgtttgactagtttttttctgaaaaagaataaagtgatcaaaaccaaaagagatgaaatgtttttattaatataaagtaacccctacctcaaactgagtctatctaatgattgcttttaacagctaaatattactagtggagtactttttcttctaaagagtccacagttacatatttttatagaaaaagtcagtagagggaaaaaaacacttctaagtattcacttaaaaggaaatcacagcaattttttatattgagaaataacgagcatttcactctaatattacagagagatgtggaggggagttgcaaagcactcctagttagagtaagaatttcacatcattttaagattgtaaggttgatttaactcatggcaagactgaacatgattaaccacttattttgtttaagcaatggcttgtcttgacatgtcactgtcaggagtggaaaaaaagtttttccatcaccaaaaagtgaggatgcagggaaactattactattgtttttatcacttccagatatatatagcttatttagacagcaaagtataagttagtaaactctttcctactttaacgccagtccatgggagaattaaagggaggaaggggcaagaatataaattaatcatctacatgttttgaatgtttgctgatccaaacatctgcttctttcctcttccctgcttctctcttctgcctgccttgtacttagcttatatcagttacccacttaacactttccttctattcattctgaacacttatactactgagtaattcatgtatcccattggaaaaaaaaaaatttcccctaagtagagatctaagtttctgataaatgtttttaatttttttcttattccaagatgtttctaattaacacctggcagtttttattttatgatctggctacctaatggcatcaggtacattgcaataagataaaaggttcaaacaaaacataaacagaattgaacatttcttaaacttagtacttgtcacatttaaatgcatcatattaacagaagtattgaattataatagaaaaagtaatgtaagaaaggtattctttaaataagaatgtttattcattgtctttttctattcctaggaatctgtcctattgggaaagtcactgcgacatgattaatggtacaggtaagaatatttgttttgtggtcatcacagttaatccacctccctttcccacaaatccaccgttgtactgacagtgttctgaaagttgagggtgtgtgtttacttgcctttatatccccacaacaaaattcagagtcactatttgtatataggctaaaggtctgttcaatgtgatgggatttgtaaagattaatcataaaaaattagcccttactgcatgattcagagaaatgtttgctttgtaaaaactttactgccatcctggcaacagaagtaaatggtaaaaaacaaacaacaacacaaaacactttagttacatttcaaatattttataaatagtatacagataagttagaattgaaagaattaaaaaaagctaattacaaaatagaaaacatatctaagcaaggcttatagctgagatagaataaagttgcaagacagaaccatccatttttggataaggtggtcagaatgagagagaaaacaataacaaagtcagatgtcttcttaactgtgaaaaatatatgtaaaaaatgagcattcataaacttagatttaaggtatggttagatcaggcttattctccttcaggaaaagcaaagtacagatatgcctattagtttaagaattaagatttttaaaaagcaatgggaggctggtcacagtggctcatgtctataatcccagcactttgggagaccaaggcaggtagactacttgtgccccggaggttgagaccagcctgggcaacatagcaaaatcccatctctacaaaaaaaatacaaatattagctgggtgtgctggcacacgcttttagttccggctacttgggaggctgaggcaggaggatcacttgattccaggaggtggaggctgcagtgagctataattgtgcctctgcactctagcctgggcaatagtgtgagaccctgtctcaaaaaaaaaaaaaaaaaaaaaagtggtgggaatcgaataccatgaagtaattaatatccagaggcaagctttcaactactaggaaacaaaagcatgaagtttagaaaattagggaatatcccataggaaaatgatataacaaagataaagacacttaagtaaaaatgaagtacagagaatgtttactttgccaaaggtatgattattgacttcgtatgcgtacttgattctatcattgccttgtaggaaatgataaacaaaaaaagcaaacaaaaaaaacagcaaaaacactgttggatttgcaggggttttcttttgtttttttttttttttttttttgagacatagtctggctctgttgccaggctggagtgcagtggtgcgatctcggctcactgcaacctctgcctcctggggttcaagtgattctcctacctcaatctcatgagtagttgggactacaggcatgtgccaccacacccagctaatttttgtatttttagtagagacggtttcaccatgttggccaggatggtcttgatctcttgaccttgtgatccgcccccctcggcctcccaaagtgctgggattacaggcttgagccaccacacctggccaaggctttgcagggttttgagccataggagtgggcaaataagctattttctaagtaaagcatttctggaaataaattttcaagtcctcaatactaccaatgctagtagttgtataagcggaatacttagtccttagatgcagagataaatatactgtgttaatcctagtaaaggattctttaaggagaaaaatctttaaaaagaagattcattgacaataatagaaatgcatgagcatcaggcatgatgttaaaaatatctatggggaaaatagggctgatacaaactaggaaaagagggaatttggacagagcaggggatgatccctgtgagagagattcttgcttatggcactagcgaaaagaaagtaataaaacagtaaggttctaatgtgttttcatcgtaatttagaagtgcatcctctttaccttcttcagtaagtttgaaaagacttaaaatgaaagtattggtatacatttagaatgtttcttttgggaggacagaaaaaaagctctgcaaatatcaactatgttgcagtcattgtccatggtagttgctgggtataattaggacataatcttcaatgatattttagataatgatcttaaaagcttttcaatgcatttttctttaattattaaggaaatggaaaagcagttgttgtcaatgtccatatgggggcttatattttacttgtcacaagagtgtaaactaatgaaaacaaggtcacaaggttgacacacttgccagagaaagaacctacaatgcataatcaaagatgagacttaccatttaaaactcattcaatgacggctcgtattagtgatattcatgtgagaagtacatggaggagttaactatttcttcatatatccaatgtttgccatggatcatagctgtagcaaaaagtaaattcaataaatgacttttttatacactttcaaagcatttgaagttctgtttagtgagagaactttagtaaatatttttagaagtagtaatcagccattaggacaaatgagaaaaaaaatcactacaaataaatgtggacatggcaggagatccaaatgaacttcactggaagaaaagtgccactctactggtggggtagggcatttcaaaaaacaaacacaatgttagccttaacatttcatgtttaagtttcttttattttgtaccattaaatatgtatagtatgtagatttgttgttgacaatagcagccgccagccatatgtaactgttaaggactcaaaatctggctagtatgatttgaaatgtgctgtaaatataaaatgcacagtagattttgagactttaagaatttaaaatattttataatggttacatgttaaaatattttggatattaataagttaaatatagttttgttttgtttgagacaaagttttccacttgtcgcccaggctggagtgcaatggcatgatcttggctcactgcagtatccgcctcctgggtgcaagcaattatcctgcctcaggatagctgggattacgagcgcctatctcaggatagctgaggcaggcctatcctgcctcaggatagctgcctcccaagtagctgggattacaagcgcctaccaccacacccagctaattttgtgtatttttagtagagatggggtttcaccatgtaggccaggctggtctcaaacccctgacctcaggtgatccacccgccttggccttccaaagtgctgggcttgcaggcatgagccagcatgcctggccggttatttctttttaccttttaaaaatgtggctgctagataaattacttaggcagtttgcattacatttctatggactacactggaggagagatttctaggtttttttctagaacacacattacatctaatcatttgccactcgatttttaaacagatgcagcctcatttccaccttttgttgagaaaagccaggtattgcagttcttttcttctgatatttgcaggtaagacagatactgaagtataagtatgtctgagtcagaccccaggtgacaaaatgcagaccaagaaacttaaacacagcataggaaattcatcatgtttattaactaactctttgcaaaatgttcttctgcatcttccaatttttaatagtacaaattttttttttttttgccatttctatctaagcaagaaccattttgccttttaaaaactaaactagtagtctattaacgatcaagtccagaagggcgtgcccaatctttctaaagacatacagagaagatgatgcaaatgtaacagaactgtgttaatgtgctctgctcagatttgtggggcccagtagataacacacaagcactggagcctttaccactacccttgagcccaagctctgtccctaaagactgtatgcttgtgggtaggcatttaacatctctgaatttttttcttatctgtacaatttaagacagcagtatttcttcatatacgtgtatctggggataagaaaaatatgtgtattgaaccctatgatagacacttggtaaacgatggaaatgtaccaggtatatatccagcatgtatatgcatacactccagtgagtggtctttctttccaggattaattaagccgtgaaagaaactatttcatttaaactgatcacaaataaagtatttgaaggaagtcctataaatatttactctattggataaattgcctgtgagaagtaacttgagtataaataaacatggtacttcacaaacaagaatagttcatgcttggctattgagttttagtatgtgttaaaatttcccaatcactttttttctaagaatgaaacaagaatttaaaagagtatatgatgtttctaagttaaaacaagaataagaaaaaatgaatctccagaatgtaagttcaggttcctggaatgcagctcttttttctctgtatttaggtcaatctatgctgtatttgaatccgacgttaatctgaaaggaatccctgtgtatagatttgttcttccatccaaggcctttgcctctccagttgaaaacccagacaactattgtttctgcacagaaaaaattatctcaaaaaattgtacatcatatggtgtgctagacatcagcaaatgcaaagaaggtgagtaaataacctcagtagcacagtccataccataatttgtgatattctttaagatgagaactttaccataatcctttagcaaccaaaatttaaaatatatcataatttgtgatattctttaaaatgagaactttaccataatcctttagcaaccaaaatttaaaattaaagtaagaaagtaattagggcagaagaaagaatggtggcagaaaattttagtgctgattttgtattttgggaagatcccacttgtgtttcagtattacaaaatttagttaaaaccacaccagtatttccttgtggctgcttttagatttagggtgaaatgaaaataattccgagaacacattaaacatcctgttattcatctgtcctaacttttttcactagaaaatggtacaggtaaatgtattttcagtatgtatctaaagctagagttaaacataaaatttggagactagcttatcctgtacatatttatcatactaacgtgggtgtggaagaagaaagaaaaaactagtgttaaataaattcttagtccatagacatattactgcctgaaagctttacatattgaaaattaatactgaaggagtttatagtagaaatcaactgacataattcttccccacccatgttaaaaaccatgtattttttaatgcaagaagctttagttttgtggaaatattttttgagttatatgtgaaatgaaggaagttattaattccaattgactcttaaaacttgtcttcagggagacctgtgtacatttcacttcctcattttctgtatgcaagtcctgatgtttcagaacctattgatggattaaacccaaatgaagaagaacataggacatacttggatattgaacctgtaagaaaacaccttattgatctgatttggttgatatttttaaaaatacaattgaaataaaaataatcttgtcgatgattatttattcaataaataatcatatttattgaatcacattcttgaaagttactgaaacttaggtcgatttcttcctatggtttatgaagtgattctaattggcttaaaataattttatataaatatttatgtttagatgaggagttattgtatattatgcaaaagtcaaagagtatatgtgagtttgactatacttattgtcaaaatctataaaattgttgtagcgcaacagttttaatcatctttatttttgtattttccttttcaaaaagtaaatgaaattctaggattttagtagttatgttttagtttaaacaatgacacatggattctaactgaatatatatttgaccaggaattatctgagatcttatattttgttgctgatttttgattttttaaaaaccatttcaagtaactcacaaatctaactaactaaaaccttgacattcgattgggcaaataaattgtgtgtatctatatggatgcatgtgtatataactataactatatatgcagttttaaaagtttcaattagtcctgtttaaccttaagttactaccttctcttctgctgtaagaaaaataagttttgaatagtataaaataatgtttttaaaagttggtaattatttagttgttctctttttagataactggattcactttacaatttgcaaaacggctgcaggtcaacctattggtcaagccatcagaaaaaattcagtgagtctcttgaaaatggttattttgatatgatctgtagtatcgtagtatcttcttgtaagaacatgagtaaatctatgtaagtaagtggaaataacatctgatatcaacttatctttagcttaatgtcaccaatcattattaaatgcttatgactaatttcacagattttggaatggttttatggttttatttgagcatttgatagcatctcttattttgttagctgcccaaatatttctatgacaataattaatttttggaattcatatttcagttccccgagaatttattgaaaggaaaaatccacacttgtgaaaaaaaatcaatgtgattagaagacatataagagcaaaggaagtcaaaaacaactatattaaaatttaaatgagtcattacaggaacaaaatcaaattagcaacagcaactaatttatgaacatttattttaaagtttgttatatataaatattagtttatatgttcataattattttcaacgtatattacagagtattaaagaatctgaagaggaactatattgtgcctattctttggcttaatgaggtttgtatttgcagctgttagtcattaaaaacaaccttctttgtatataaacaagctcttgatgtttcaaaagaatgtatagtatttaaagctatatgtatttccattacccatatggatgagtatacatttatttaacctatttgagatgatccaattgaacaaaaacatttcctatcatttaagattttcttcaaaaatgcatctattaaacacattttcttgttgtaacatttgtcttctattgcctgacaaggtatttttactataaatccatgcattgatagctataaaaataggaaaaacattgaataagtctttggagcaaatgaaactgttgaccctttgatagttctgaagagcaaatgaatcctagtacattgaagagtaccgtactctatctggcacttaattgcctttcttgacttgcaaaaggaattccattaacttgccttatagatactgatgactaacaccaatagaggtgttagaaaaaagggtgataggcaattgaagggtttattttgttttactaacgtacccaaataatgttgattattaacttgattacagactgggaccattggtgatgagaaggcaaacatgttcagaagtcaagtaactggaaaaataaacctccttggcctgatagaaatgatcttactcagtgttggtgtggtgatgtttgttgcttttatgatttcatattgtgcatgcagatcgaaaacaataaaataagtaagtatgtaccaaaaaatattgcttcaataatattagcttatatattacttgttttcactttatcaaagagaagttacatattaggccatatatatttctagacatgtctagccactgatcatttttaaatataggtaaataaacctataaatattatcacgcagatcactaaagtatatctttaattctgggagaaatgagataaaagatgtacttgtgaccattgtaacaatagcacaaataaagcacttgtgccaaagttgtccaaaattgactggttcatttctcaattatatagctagttatatattatctgatacttaaaaataattgactaggaaatggtttcataagaccaggattgctgcatgtagacatgctggccgtgcattttccaaatccagaaaagtcctgaacaaaaatttgaatataatagtatcaggaaataggggaaaatagtgttcaacatagtagaaccaagtactcagagtggtgtacaagagtttaggcctctatgctttagatattagtgtccatgcactcttaaagatgaatgaatgcctgacctttcctaaaggaaaacctttttttagttatcacaggtaacattggtgttgcctgtgggggagaattttttactttctccctatttttcttcagcccacctcaaggcaatgtaaataaaagcagtatgtgtgttataataacttatttagttgtttactgtgtgccagtaccatgctaaagaaagattctttatctcacatgatccctaatacaatttcatgattttccaatagcctggattcatcagcatccattctatcttctagagatgttccatgaaatcatacattttaattgtttgtgaccaaagcataaatcagtgaaagtggaatttggggaccaataatttccttttgtgagatggagagcttgtgtttgaaaaggcaacctaatttttggttctaatcacttctaccactatttagtcaccaaaaagacaataattctgcatccaaactatttggacagaatggcttcaaaatgctagcctaaaatgttcacattataaaaagttaaatattaccttcaatacctgtcagtagcctactgacaaattatgactaaacaaaggtatttgtatgactatgtaatagatcatccgctgaaaagtaaaacaaaataacaaaaaaacttgtcctaatgggaaagcatgcttaataaaaggaaatgcagaagttataaacatgttttgtaagtaagtattcagaattaaaattatgtgatacatttttatgattgcttaatgatccttggatgtcagattccttgggtctatttatagctaaattataatgaaaaattcaaggcttgctggagcaactttgtcaacaaatatattagttttgcttatatatttgatttttatgtggaaaaattactacccttttttacaagcagagaataaactgttgattacttgatttactagatttagaagaatcacaaaagatatgtagattttcttaagcaaaattcagctcttaatatcataaaaattatatctttgggcagatttgtaaacaataggaacaagtaagaagacaggtatgtaagaagtagcaaagtgtaagacggtggagctttaatgtgtggttttactcagggggtcacaagaaaataacccaatggtccttttgaaagtagtacatacacctttaaatggaacttggtctgaagggtgtggaaatgctggtccagggcagatgcacttcagctaccgttccttgcctggtgtgtgcttgtcttgaagcacccttcttatgtgcctttctggaatgggaatgtgttttgccctattggtgaagtccgttagagaacttctctctgcagctagagaaactgaactgattaataaaaagtatgatatctaagatatactgccactctacaggtagtaaatgattcttcacatttgtgcgccagctacatcatgacccttggtaataccgaccaacaggatgaaaattggatatgctttacttttacaaagcacaccttatcttttagttgaagaaatggtggcactatttctttttttgcactaagcaactgcacatttcaaaaggattattgagatgttatgaaaatctctaccttgcacaaaaaaaaacccagcagcttttaaaattcatcatttccacaactgaattgatttccgtttctacagacctggctcaagcacaaaccaatttgtgttgttctgattcaataattggtttctgggtggccaattcagaagaagagtgtacatgctcaacaaatcctaggccctgcattcctgtcatcctcatccgggggaaacaccatcatcccagtagctgccctattcaactgcaacagtctccaggaccatcagtatactgcatttcatgtgcaccaaatattttgaaagacatttataaataattggcttatgactcatatttctctatgaataccttcatacagcaggtataactcttttctttatgggcttaaatattttgtcactgatcctgcaaatggacatcattttagcacactagcggtttatattttaaggaccttcattctctgttctgcacctcttctggaaattgagtaaattttgcttttttttttttactcagttgcaacttacgcttggcatcttcagaatgcttttctagcattaagagatgtaaatgataaaggaattattgtatgaaatattacaaagcgtagactatgcattgttattcattataatattttttgctgtcataatcgcctcataaagacaggtttcaaccattaaaatatgttcttccttaaattcctgtgctttttctagttcctcttgtgtcataaaatgtttatcctaattttctctctgaagtatattttatctgaatccacatttctttataaatccatagtccttgctgaaatatgctttctaaatttctaccactttgttctaggctaattttttaagctaattggatgaagaacaaaaagacatttggtttcatcctttacagcagtaggacaattgcaaaggtttttcctttttcataaggagacacattaataggtaactctgtttcttgagcaggggttcacttattctgagagcattagttctcctaaaaagctccagcatagaaagggaagataaaccaaattctagcttgtgttttacccacagaaggatacaggacaaaggaatagtaactggcctgtttggatactaaaatcgaaaataacttttagcctcctccttatgatagccgccagagtaaatgttgagcattactacagaaaagccacaaaccaagaatctacctgtttggaaagatcttttgcatctctgaaggtgcttaaagcatacttagtgcctttccttttaactgggaagataaaagaagtatctgtccaagatattaatatgtaagataacattgtagacatgttcttctgataatacaaggtttattctatttgcattaggatatttgtggacatgtccatctaatataaaggaaagttttttaatcattgaggcatgtagggctgagttatataatgtagaaacttctaaagataattggatgagaatatacatattgacctgtatattatgactaatcatgactcagatcttaatacagggatgatctcatagcatttagatatcagaaaaggttttgacctatatgtctttaatattgtttgaatacatgtataatctttatcattcctcagtgtttcatttctcaaattctgtaaaaggaatataagaggaaagacaattcatatacaaagacaacgagattaaaaatatgcagtaggaaaaataattacttaaggggagattttttttacatgaaatctgggctttggatgtgtgtgtgtgtgtgtgtgtgtgtgtgtgtgcacatatgcactgtggtgggagtggggcaacttggggaatatgttacatgtgtgactttgttttgccctggcgaagttaatgttgttcagaaagggtaaatgtttggacacttgcaattgctcatggatgaatttatatgttttagtcatagaaaaattgtaccctttgatagaagcacattttctttccaaagctggttattaaccacagaattatagcaggtattcataacttaagtttgaaaatcaatagcgtctgcaaatggattaacagattagagaatcaacagcatcggaaaataggttaatgcatattgcttctaacaagtgcatgaagaaatagaagaagctatgtagctttcagttctgacagaaaagggtgaaggagggtatcatttcaagaaaaaaaatagctatcacgcaatggttatctctgaaaatatttgtattaagatgtgtatacatggccaggcatggtggctcatgcctgtaatcccagcactttgggaggcaggtggatcacgaggtcaggagatcaagaccatcctggccaacatggtgaaacctcatctctactaaaaatacaaaaatgagcggggtgtggtggcccatgcctgtagtcccagctgctcgggagactgaatctcttgagcctgggaagcagaggttgcagtgaactgagatcgcgtcactgcactccagcctggtgacagagcgagattccatctcaaaaaaaaaaaacagtatgcacgtacaaatttcttaacctgttatcaatgtctgagctacataattatctttctagttggagtttgttttaggtgtgtaccaactgacatttcagtttttctgtttgaagtccaatgtattagtgactctgtggctgctctcttcacctgccccttgtggcctgtctacaattctaaatggattttgaactcaatgtcgtcgcttctggtttcctgcatataccaatagcattacctatgactttttttttcctgagctattttcactgagctgagctaatgaactaaaactgagttatgtttaatatttgtatcaaatacataaaaggaatactgctttttccttttgtggctcaaaggtagctgcattttaaaatatttgtgaaaataaaaacttttgttattagaaaaatga

SEQ ID NO: 165 - DNA, 158771 bp, Homo sapiens
gccaaaacctttgaccagagtctccttgccagcattcctacctccctttggccagctatttgtgccaggtaggaatcaggctgtactttggctgtgtgtgtagacgccaatccccaggaggcgtgtgaccttttcaccttacccacaaactccctgggaggtgccccgtgggcactgacccttctccggggcctgatcggtgaccgcaacctgtttcttcccagaaatgtccttgcttttcgcatctacaaacgcttcctgcagcacttctcggaaaaccctcggggacgggcctggggggcatccagcgggctgggggcacgagccgctgtgggaagtgggggtggcaggagctccagggccggcgtgcacgttgtctgtggccgggagcggacactgagagggcgcagcgaagagcacccctcccccgccactctttccctccctcgggatgcacagagaaacgggggccgcccgacccctgatttccacacccctccctagcacctgggctcccagacaaggttgggcggggtcgggcggcgattgcccccctgcttggaaggcgcagcacctcccaccctccggtgttccctctgccccagaggaacgggcaccaaatctcgggaaacaatgaagcctccgcggcgcgcagagggcacccagccgcgcgccctgatgcgggccagggaggccgcgtggggctgcagcccggcctcgcccgcccaggcggtctgtcttcgcttcacaccacagcgacactgctgcccctcgcccggcttcgcggtgcggctcccactccagcccggctttcccctcctcgccctccagctctgggcaggggcgtccaggggtgccccgctgctccccgccacaggtctcaggatggcgcgatgaggagtggcagggggtgaccctgcgttcctcgccgccgagggcgcgggccccgggatttgaagttgcgagaagcagccgccacctcccgggcgctccgcactgcgcggcggcgggatctgcgcctgcaggagctgcccagctctccctctaggggtgcagagcgagcacgcgaggtgggctggccagaccctgcggctggcactgacctccgcgccccttcctccgacgcccgcacccacgcgaccggggcgcagactcccagcgccttccttcccgcggagatccctgcagggtctctgggaaagacagacagacggacggggagagcactcggagggaaagttgttcctcccagtctcctgtcaggcaattacaggcgagcccaagcggggagaggggcgggaggaagcgagggaagggctccggagtggggggaggccgcaggaggggaggcgggggtgcagttggtgaaactcctctgtctcccgctcatcttttcattgctcgttcccctccttcccgcagacacccggacctcccctgggcgccagctccgcggctccaacgggtccagaaacaagccggattttttttttttcttcctggaaattggctttggtgtgtgttgccctacctccctcctccccctcccacccacagcccccccccggccttttttttttttttttttttttttgagacatggcccgggcagtggctcctggaagaggaacaagtgtgggaaaagggagaggaagccggagctaaatgacaggatgcaggcgacttgagacacaaaaagagaagcgttcctctcggatccaggcattgcctcgctgctttcttttctccaagacgggctgaggattgtacagctctaggcggagttggggctcttcggatcgcttagattctcctctttgctgcatttccccccacgtcctcgttctcccgcgtctgcctgcggacccggagaagggagaatggagagggggctgccgctcctctgcgccgtgctcgccctcgtcctcgccccggccggcgcttttcgcaacggtaagtgacaggcagaggcgcgggtgacagcggcgccccggctcccagctgcccgccccggaccggggctcaggcggggcttcccgggatcagccgggaacaaccgactcccgggcgaaggaaacttttatctgggaggagagaagaagaaatgagatcaggcggtttagagcaggaggatttcaggtctttgggctccctcctgacgttgatccttgggctgtggggcttttccttacctctgttacaagacagagctgtctaccttcccagatcagcatgccaattatcttaataatgtttcctcccaaaggcaattagaagagactccctttcaaaaatctgatggctgttgaaagttaatgaacactttaccaggagatcttacttcctggttcctttgctgctcccctaagccgtttcctctggtgggtgacggccagagatatcggtttgtgggttgatgaaactccctcccccgcctttgtacaccttccgtaatctgtctggagtatgactgaaagttacatagtatcaatacaggaatctgacatatacagtgtaaggcaccaggatatctgaaaatccctaagctagttgcagcttccacttagcttttaaaatcactcactgttaagtaaatgaaaaactatactggggtctaaacagtaccatgtaacctaaataatgtgttttaaaatgggatctggttgtaggcatgtttgacttcacactgtaaagtaagtgcaggcaagggtatgcaattatctttacagtaagtcgtcagcaattgttattaactaatgatcaaatatttacttttgtctggcttagatttcaatcacagtaattagaagaaaagaacatccactacttactgtggtatattgttttaataagagaccgcaagtggagggcctcataccaacaggaatttaaatcacatctttatgatggaagttaatctctctaatatgctttttcaaggttttgtgattttagcaatggatttccctcagcagctaccaagcagtattttaagagatgcttaaagcaaaacacatgcaaaaaaaaaaattatgaacatggaattcagcttattaatgagcccaagttgatggcatttttctataatctggcaggaaagcaagacacaaaaaattatgaatgtagaattcaatttattaatgaacctgagctggtagcatctttctatactctggcagggaatgaaatagcattctcgtccaactgaaagagctcaaatggttggactagaaattatagtaaccctgtcctccacaactcttgagactaaatccatagtgggggtgttcacaagatagatttgaagctcaatgcaaagagctatcagactttaggttgtgaactacacaaatatatatgcagtacacacacacacacacacacttcttagttttcttagcagaaatctggggaatgctgaaaatctggctttagttgttgagctttaccagcaaaagccatgtcgctatgcttgaagtgaccagagccagaaaatgcctctgtaactcagcagacctctcaaagccatgtccacctcctctgagtaaccagtgtctgctaaattaattcattaaccttatttaggactaatggtccagagtcattagaaactgctctttcttaatcaactgctagagagattgaacagagccagggagtctagcagtccacattatcttattacactgtcactttctcagaagtcacagattaaagagctctggtgtggtaccaagtccacctaaatgtcttctgaagtgactctgtcgagtgactagaaccagtgctgttttatttcactcctgtaacagatgccagacactaccatgatgtttgtccagagctagaggaaacttaatgagacgaggtcactttccaagttttctgcacattcaaaataatgcaagagtctcagcagaatcacataacagagtccaacatgatcattagctgagattttgaactccagttgcaacatcatttcttcctggcaaagcttacacttttacaagccagtgcaaaggaaaccagcataagactacccccagtctaaggaacaaagtcagaagcacctagcgattgagaaaaacaatataacttatattgtcttctttttttaatttatgggaaatgatttctgtaatgcatgtagctttatgcatttttgatgtgcacttcatctttcatttccatttgacctggttttcctgtaataaaattctgtagatttataaattcatgctgagagcaaagaatgccattctctttccacagggaatctattagatgcagtgttaaaatctacatctaccattactgaaaatttgtgattgataggcttatatatttcactgttttcataccgtttctcttatatagtttatgcaccgaatttttattgctcaaaattaagcatcaataaatgtggcagcatttcaggctgaggtgctccagtatgaaatccatcataaaatgtgacaatgagaatctatgctgaacaatataggcagcccagagactggtttacttggtttatttggcttcacttgagcatttttgaaatgaaggctcaaaactacttagctcacctttcccagaatgtgagaatgtgggttaccatatgtgatacccagacctgtgtggtgggttatttttcacccaacatttaggtaattagaattaatgccatgtggctatttacttttccttctgccccgttgctttgatccgatctccaagcttgaacaactttacttggagaagtaaagcagaattatttctgcttcaccaaatatactttgttctctgttgatttggatctcaagagcagagataactcaaaatcacttagatttatgggcagataaaacaacaacaacaaaaggtttggctttaagccaatcaaagacaatccccactgatcaatgacatagaccaggcttatcatcaaaaaacaacacaaggggtcgaacagcatctttcagtcactttccacttagaacttgctacttaatgtgattacacttcttgggggataattaagtctagcagaagctcccaggggaccatgttaacatcaattgaggggatttaatgtttttaatgctagaagaccttttccttaggaagaaacttcggggctggggggaagagtcctctcagatctcagttggctttctgcctgagtcaaccttcctgagatcaaagagtgttttttcctggagtgttgcactcagagccacacgaaggacttacggggaccttttagagttccccttaaaaagttaaggaatgtttaataaccagtaatttacatataaagctagattacctaacaggttgtcaggaaagatctgctaaaatcttactttcattgcagataaatgtggcgatactataaaaattgaaagccccgggtaccttacatctcctggttatcctcattcttatcacccaagtgaaaaatgcgaatggctgattcaggctccggacccataccagagaattatgatcaacttcaaccctcacttcgatttggaggacagagactgcaagtaagtgggaatgtttttgaacagggcaccacagcaccatctagtggtcacgcctgtctacgggggggaagtcggtgtgtacaatgtagattataaatggatccaggagggattccaatctcagccagattatatgtcaatggtatggaaattgaagtacgttaagtgatttctgagttccccaaaccaggaagattatagttaaatgtgtaagctcttatactccttcctgttagcacttttggtttgggaactcttgttaagaaatgtatacagtatgtatgtttcttttttctttctttttttttttttcctggagaggggaagaactagaaactcaaaaatctcacttgtatttttacgaaatacagtggatcactaatatacatcgcatccacagatagtgtgattggagatctcactatttgagatatattgaactgtggcacatcttatgatttaagaactgcattcatcttactaagtaagtttgacatggaaaaagcaaattgaataaaataaggcctacaggataagccagatgaggggttttgtaaatggtggattactgattaaaatacttttatggaaaatgctagaaaataattgttaagacacgatgaatacaatgggaactcaaatacacatcagtgtttcatccacctgcttagtcttgctatctctttctattgttaagtttctaaacatcaacttatgcccaatttcgttattatgaagacattctcactatagagacagtcgaaattatatttcctcactttatgtgaaagaactggtatgtggatattgctttccacagtatcgaaagtatgtttttaccttgcacgtagcagtccactcagatacatgtttgctcgtctctcttaacacccaacagaccccctgtctctgtcttgtccacattatcccattctgacccactgaaagtggtgtagtctccagagacttgaacctgaatatccatcttttaagtttgtacatatataaatagttttatcaaagaaaaataatcgatttaaatctcaattctaaagtgtttctcagggactgagaggttttcacaagttttaaagtgggtcagtttggtgtaaccgtatatgatatctacagactactgctaccgctggacctaaatattattttgcaagtatattcattgttaaagacagtctatttgaacacacatttcttttgggaaagaacagagtaatatcaaaatcttcctacctgtaggaagtgctcgacaacctgttgagttggtttagtaaactagcttttcatggtcagagagatgaggtcatttggttcattcaacattttagtatctagagaattagcataaatccacaggctgatgaccagtttccaaataatcagtgtatactacagtgcaacaaaattacaccaattccaatttatctttgctttgtgattcagaagtgcctcagggcattatattgactttttaattgtgtatggaagttaccattaatagtgttccagtgactgcttggaaacaaagagttcattgtattgatttatttatttttgctaatattctttatggtggtttttacagtgtcaatcacctagacaatctggagacttgttttcttttatatttgatttacttcattagtagtagcagtagttattagtatttgctttttgaccatgtttaaactgctataggagaaactctggtaaaacatactcaagtaataacattattccaaaaaataaagtgctgttagaattcaataaactgacgtttactaatttctaatctggaaatcatgaccatcaatacgtgtaatataatacttaaagaattcagaataatcactagttattggcagtgatgtggtggtaaatgtttaacagctggctctttggagaagacgagtcaagtcctcatttgtatgtagcacatgccaatttctgtggtgtaaatactctcatcatagccaatttcaaactaaccatgtgatgtcactgtgcccagactagcaaagaaatgtgcacagttggttcttatgagctggtgggcgccagatccagcacacaactggagtagaaatttaagaagggaagccagttgaatcacttaatatatgtaaagggcttacaattctatttgcacatacatttcttctgggaaagaacagagtaatataaaaatcttcctacctgtagaaagcgctcaacaacctgttgagttggtgtagtaaactagcttttcatggtcagggaaataaggtcatctggttcattcaacattttggtgcctagagaattagcataaatccataggctgatgatcagtttccaaataatcagcgtatactaattattacaacagcatctcacagtattacaatggtgtctagctcacagtaaaccttaaataatgatttgtcatatcatggtgtcaggtggggtataatgggattaaaggagcacctttttggttagttttctttttaaaaagtacattaaaagatgattgtaattcacagaaaatgacagttttagtgatatcagcaaagtatttgagaaactgacatggccaagaagatgttacataacaatcttaataatggtgactttgtttgtttttttaatgctacagagtaaggtgatttcttaattgtcccaactgaggctttgctctctgtgaaggtgtcatctcctggccaaagctgaaaggctgttatatttagcctgatgaagtcaatggagattagatccatggaaaatatcttcctgctgtgttttgaagtgttgcattgtgagctttttatcaatgagaaactccagaaagatataggaagaccagcataaggcattcctttcactatctttctaagctgattcatatgaatgactagtgctcagtgttgaagggtgcatttgagattctacaaatgtggcaaaatacttacctccttttgtgaaggctttgagaagaatccacagatttaaattttacaggggattggaatgccctagggggaaaaaaaaaacctgggaacaccagaaattatttgaagaacaaattcatagacttcaaagtttagattagattcctacaaacatagttttgttattagggtttttttgtactttatatcaggctatttacaaaaatggattggaggtggcacaaaactaggcacagttaaaaccacattctgaaagctggtgagcttttagttatcactcttgttaagaacaaactattcatcttatttaagacatttaatatttttccttgttccagcttcattatatgtctgttggcagtaaaaaacatttgctatgctgatgtcatagggttactagtaggatcaagtagtagataggaaagcctttttaaaaggtaaaagtgaccctcaaaataagttatcattattatgatatctttaacaagttggtgatttttagaacatttggaaatatgaaactaaacatacgtcaaaactaaatctattgacccagtaatgagatgatttgcacatgatacaccctgcattttctcttgaaatggtcagtatttgtatagtcaacttccaccctgagaaagcttaagaaatcgatgccttagcacatttgcttattgtgaaacatctttgaaacccaagtaaacagttttcttttgtagagtatagggatggttaagtcattagaccagctacatagtcctggtagaaaaaaaaaaattttttatttagatttttattgttttatgtataattaggtaaaaaacatcatttcataatcttaacaatacagtatacagtcacaacttctcatgtgaatagcaccaagactgacccagttcatgagttaattctggatcatactttgcaaaatggtgaagtttttgcagtggctgtcaaaggtggatacttcgttaggaaaattaaatgtgtaagttgtgcctccatagttttaacatgcaacattctgtgtctatgccagcactgaatgaggtttcattacaaataagcatcagaaccataatactataaccccttaattcttttattgaacaagatgtggtgtaaatcagtcgatcaacagaccagtggagcgtctgtctgcagggctaacacagaactaggattttttcccagctatatatatgcatgattttattattagattgagaggattctagagaatgctctgaccgaagaaggtgttgagggagaggaaggaatgttgatttcttttttgccagcaaaatcctgcacacttgtgaagtgtcaaagcataattaaaaatagaaaagaaataaagaagtgaccagtggagagttttcggaaacacatgttcattgcacattgaaaatggttttcagtatgtacatcgaactagttagatcttactccactaaagttttcttcagtggtaaggcagacatcttgaatctcataaaagtttatatctgtataataaacaagaatgtcattgatatggtagttagaatttatgaaacttctccagtttcccagcaatgcacacaatcagcatgataatttataatggtttgtgacaaatactgctgagcaaagaggtgtatggttacattcagatcagatgtcaccatccggggagcaataaaaatttcacagacattgggttaaaaacattaaggaaatgaatgcaaagctctaacaaaagtctaaaaaggtggtagcattgggggactcaaacccagtagtgcttttcctactgacaagaagaaaatcttacttaccgacttcagtgtctgatttgacagtgctgtttcatatcatggcacagttgcttttttcaactatgatttagatttgtaatctctcctctgtgtaaccaacaataggcatgtttttcctaactcagtgcgttcaaaggaagatcgcatacttgtaacttcgtaagaagtttaatcatagtgaaattataagcaaatagagatgatattcgtttcagaattttgttgggataattcagatattgttcctttaatgctagtttttaaattacctaaattattaaaaactttgaaacagtgctaatgtcttttattttcagagaatataaacttatggaatgaaaaataatctgcccttggtttctcaaatctgattattcccgcacatttacatttattcctgcacatttacacttattggcattttttggagtgtaagttccattttctgttttcctgagtaatatgagtaatattttctgttttaatctttctttattattactagcatggattttttaggattaatttggatttttaaaaaatgttacattaaaatactatttatcttaatcactgagtttttggctttttgtatccaagggaagtacctcactctagtcttgtattttagagcatcacttagactaaaacaaaatccttgttttatggaaaactgagttttttaagccaaactacatctctattttccatatgaaatagagaagaatatatacctttagtaaagtataatatatatttagaaaaatacacaacccaagtataagatttgataaaattttgcaaggtggatacatccacaaaaccaatctagaggccaacatttccagcttcctagaagccctctgatgtcagttttagtcaccaacctttgccctcaagggcaactgctgtcctaacttctgtgacttcatttttatacatttcaaaatcaggtaaaactcaactagagtcttagaagtctgtatgtacaggccaggcacggtggctcactcgcaaacattgggagccagaggcaggcatcacttgaagtcaggagttcgactgaaaccagcctggccaacatggtgaaaccccgtctctactaaaaatacaaaaattagccaggcaaggtggtgcacgcctgtagtcccagctactcgggaggctgaggcaagagaatggcttgaacctgggaagcggaggttgcagtgagccaagatccgcaccattgcactccagcctgggcaacaggagcaaaactccgtctcaaaaaaaagaagcctgtgggtactatccttgaacatagacagtgaaagtctttggagtggatatagaaaaaataggtactatttctaatcaaaaagcagaatcctactgatgcattttctaatttttttcagtggctactgatggaaatatcttgtctttgtttcaaacttttcaatctggagcctgctttattatgcagattttatgtgcaagcaaattcagaaacattctcctttgccgtatttttcttcatctttttatttctggttttgatctctggtgacttctcaatgtgagaggcaccaccaccaagctcaattcaattaaaaaactattggtggaagaatgaaccctcctcagaagaactgctggccaaagttgttactaccacttgcagcatccttggttattactcaggcagataattatctgctttcttccttttgatttttttccccattagcaccaaatttaatttgaacagagcctcgtgtgtttaataaaattaattttctttattatcccttagtataagcaatcacatttgatcataatgaattttgagtattacgaggttgttttgtgttaggcatttctgtaatttaaaggaagcaacttttgcgagctaaaggagaaggttggttgaaatcttatcagactgaatcaacatgtgcatggcatttccaacgagatttcactttagggagcaggcacttaactgatccaagtgagacatatgccttcagcgggcatgcacattctcagctcctttctttccagcataaaacttgatacttgcatgcctgctgacatggctccacagaagcgcacacacaaacacatatgtgtgtgtaaaggaagctaaaaaataaacgtaactaattgcagtggtagtattcatctagactgatcattaagcctaaagaacaacaagaaacaaaaattcatttggatcaggttccaaatgcctcttgcctgggtgtttgtcatccatcctgattgtaagagtcagtggcttggcagttcgttgcaccttgagaggagggttctcctgctcttctctggttgattggcctgtatctggtatctagggcagttagtagtgtcttatggttgaaacaattcatagatagcttaggaagtgaagcacattcattcagagctctactaagttctgcagaggagcagaggaagaaaaaaaaacaaacagaatattttggcttccgtctactcaattcctttatagagttcaagttcatggagaacttttgccttataacgtggtcttcctcctcatcaagcccaggtctttattgctagatcttctttggtcaacatgttgtttttttcttctttaacttaaataatcatagagtgtttgggaaggaataattatgactggtttttttttgaaaaacatatttatttatttatttaaaacacagaaggatgggggggcttctcactatgttgcccaggctggtctcgaactcctgaggtaagccattctctgtctcagcttcccaaagtaatgagattacaggcctgagccaccatgtccaacctatgccgggctcttgctgttgagtcttcaatatgtgcccattatggggatgagcactcacttttctctcatcctcatttgacagctgagatccctgaagctgggaaaagtcatatgaacagaacccaaataaatagttgctgcgtcacaaatctttctgtctttgtgatcaaagtcacacatggatgtgctttttgaatgaggaaattctcatgaaacgttaccagcttattttttcttcaagcaactcttttattaacaagttctcaggaaagtttaagtataaaccaactaattctgaggaaggacttaatttttgaactttaagttcagattaaataagcacttgtgaaaactgtgcatagaaactttcaaccaattggtggttttccactcaattgaaacttggccagagtggtggctcaggtctgtaatcccagcactttgggagacggaggtgagaggattgcttgaggccaggagttcaaggctagcctgagcaacatagcaagaccctctctctacaaaaaataaaaaattagtgaattgtggtggtgcacacctgtaatcccagtgcttttgggggccaaggcaggaagatcgcttaggccaggagtttggagtttgaggtgacagtgagctataatcttgccactgcactccagcttcggcaatagagcgagactctatccttcagtttttaaaaaaacaaataaataaataaaaacttgccttaacttaggaatggaaatcctggggagtaaatatctaaattctagtgctttttgttgatggagtttaaaagcacaaagcgcatataaatacaatgtttatttaaagcctgacaaccaggccacacatgggtttgatctgttcaattggtaaaagggcatattagataccactgtgtccagtgcttgttctcaggcccagaggtgagaaggccacattcccttccaagcgctggtcatctacttaatctcaggtaaatagcagggaagtgttcttctcccacagcgccctcattcatacagtttcgatccttgcatttgccacggtggctctgtaagggttaaagggagactgctcaggcactgggttcctaggagaaatggaagagttttctgagaagaaacagatgctccagtgtatttcgttttatctgggtggatactttgtacaagcagccagccaggttggaggtgatggcctgctgcttctatgatagactgctatgtcacggagagagcttccagtcccgggctgaaagaggatgctaactgtctctcaattcaagttctcatatttctccagaatagccgaagatagcaaaggccagtcaatatagtcacgattccaagtccttgtctgactctcttaactgttggacgctaccagcagggcagctattatgcaagatacaagcaacccaggaagtggcatggaaagaattaagacggggtcaaaatcataatcttacatagatcacttcaaaatatttaaaggcatacattcttacatttaaagaaaaaaggaacacactcttgacttaaagattaaaaaacagacacaagtctctacaaacctggaggagctaaggctgacttggtctgataagagattaggctgttttagatgtggtaacccctggctaactaagatcactgttttatcttttaaaaaaaatctcagttcatagttgtctgtcctttttattctccaataaagtgaaaaagtgggcatttgtttgttaacacatttggtcacagaaaagatggtaaaaataaaataaaatgtaaatttctagccaggcgcggtggctcacctataatcccagcattttgcgaggccaaggcaagcggatcagtgaggtcaggagttcgagaccagcctggccaatatggtgaaacccggtctctactaaaaatgcaaaaattagccagatgtggtggcacgcacctgtaatcccagctactcaggaggctgaggcaggagaatcgcttgaacccgggaagcagaaattgcagtgagccaagatcaggccattgcactctagccgggacatcacagcgagactctgtctcaaaaataaataaataaaatgtaaatttctagatcaactcttttggaaagatggcagccagtcaagttgacaaattccagttaatgtgacagtctgactgcagcactctattttgccttccagcacccatctccgtagagtcctcattctaactgtacaggtgttcatctctcgtttgggtggcagaccccagcaagacaaaaaccatgtcttacttacatttctacctttcgctgtcccacagaatgctttgcacatgtaaacactagtttaaacagctgacacttgtattgaactcaaaatgaggtatatgaagagttgaggtgaaaaaccgcaatgtgtccctgagaagcgtctgtgacccacagtaggtcatatggagaagagatcagcaaaaattcagcaaagagagagtgaaaggggcaatttcaataactgctgaagtgggtggtttgtctggatgacaacctttcagaaagcacttaagacagccactccctgggtgttggagtgggtgcctgcatgtccacattcagagaatctggccacatccgctcctcctcactccctctagcttaatcagaggcacctgattttgaattttggggcctctggttcccagcagcacagttaagggctacggattgtctggagagagactgggtcccggtgcaggcttttttttttttttttaaagacggagtattgctccatcgccaggctggagtgcagtggcgcaaagtcggctcactgcaacctcagcctcctgggttccagcgattttcctgcctcagcctcccaagtagctgggactacaggcacacgccaccacgcccagctaattttttgtattttagtagagatggggtttccccatgttggtcaggctggtctcaaactcctgacctcaggtgatccgcccatctcggcctcccaaagtgctgggattacaggcgtgagccaccacgcccggccccggagcaggcttttacgcatgccccgcgcgcccccttgtgtccggaatttattccttccggtgggttcgcggtctagctgaccaagaacggaactggggactttcgcagtgagagttacagctcttaaagatggcaccgacccaggccgggcgcggtggctcaggcctgcaatcccagcactttgggaggcggaggcaggtgaatcacgaggtcaggaaatcgagaccatcctggctaacatggtgaaaccccgtctccactaaaaatacaaaaaattagccaggcatggtggctggcacctgtagtcccagctacttgggaggctgagccaggaaagtggcatgaacccgcgaggcagagcttgcaataagccgagatcgtgccaatgcactccagcctgggcaacagaaggagacactgtctcaaaaaaaaaaaaaaaagaaagaaagaaagaaagaaaaaaaaaagatggcaccaccgcaaagagtgagcaccagcaagatttattgtgaggagggaaagaacaaagcttccacagcctggaaggggacctgagcagagattagggggccagtttttattcccttgtttgtccccacccatgtcctgttcattggtccattttacaaacctctagctagctacagagcgctgattggtgcatttttacagagcactgattggtgcattttacaaacctcttgtagaaaaggtgtctaagtcctctgggcgcggtgactcacacctgtaatcccagcactttgggaggctgaggcgggcggatcacgaggtcaggagataaagaccatcctgactaacacagtgaaacccccgtctctactaaaaatacaaaaaaattagcctggcatggtggcgggcgcctgtagtcccagctactggggaggctgaggcaggagaatggcgtgaacccgggaagcagagcttgcagtgagctgatatcgtgccactgcactccagcctgggcgacagagcgagactccgtctcaaaaaaaaaaaaaaaaaaaagaaagaaaagaaaagttctctaagtccccactcgaccccggaagtccagttggcttcacctctcaccctcttccatgatcagttacactgggaacaggctgccaagcctgacgcagatgtttggaacatatttcagccctggctctattagagttccttatattaccaaagctgtgctagcaccttcctcaatgctattaggttggcgcaaaagttatcgtggttttggccaccaaaaccacgataacttttgcgccaacctaatacaaagggcagcccataattttatttttcaatgacgattggcactaagctaaggaaacagtgagggattttgtttgtttgtgtgtttactactgattggaattgtcatttcttttttccttaggaaacagctttgcattcttcttcccgtttctccccatgccaatttctttgctcgtgtctggggacactactgagtaactattagaatacataggttcagtccttccagacatcaccatttccctcttcagctgttctagcaaactgatgtgtctgttagttcattcacgcaagctggggattttggattgtcaggggatcctgttagcagctccctgtgaaaaagagttctggtgaattagggatgtgcgttataattgcacctctgccattcattcttgtctgtgagacaggagatgggtcatatgggctgggtcccgatatgtgaatggctcattatggcaccattaacatcgtggatttgacagtgttaaccagtacagcccaggaagatgtgacagtgaccaggttgcctacatcagagtctgcctgagtaatgccacctagacacagctttaattccgaaacaaaagtgctttccttcctctacctatctcagcaacacagtgttgatgagctaatgtagatggaagtgtcttatgaatacaagagacacatacatatttataaataataagacctaggtattactataacaggaagtgcatccgcaggtttggttccttaaataagttcagactgtaaacagtaacgtctgcatccttaggaggagacacttataaatatttcaaaagcaccaaggcactgcacatacacacaacagagatagtatctatgctcagtgtgcattcagccaataagaatttctgagtgttctagtaagttgaccagttaagtttgttataatggcagccttctgaagatctagatggatggagtttctggaaaacctcatagaagatgctatttcagtgtcacgaacttgatgataatagcatcaatgacttaaaaaaattattctttcatgtgtgcttgaggaattgtaaatatgtttagtgcattcagaccataagccaacccatacataaatagcagtattcaagccaatagctttgtggttattacacagggttgccagtccttgacaatccattcaacaaaatagtgtcattatgttcctttccaagaaagagaaaatgatatggattttgtagcataaatccatagcgaaaggcagctgggaaataaatgtttttaaactgatggtccattcacatcatttcccctctatttctagtatcccctgtcctttgaccttgccatctccttcctgcatttctggttatgacagattttccagtagtagggaggggagttggttcttagtggcaacaccaaagagcatgtttgcaggaaagagcttgggatcatggcagagaagaggttactattctagctccttatccccacctcaccctcatgaatggccttatgtgatacacactatatctgcaactcttcaaaagcactctcaacgcttcttcatttcaaatggctacagatgtggctgggagacccaatagaagggattggctttcttttttgtgggactgttatgggcctctatgggtcaaatgaattctgtaggatctacctctttgtgagtagcaaaatccttcttggaccttgttaccttgcaagcaaacatttcatatatctctgtctctcacactctgtctcacactctctctctctttcttattactgtcaaggtattgaaagtggtgactgcagttcagaactccactttcttacttagctgtcttcagcatgacagcataacttcagcgtaacattccctccagtggactgaaaatgtttgctcaaatcaaataccccagtggctcttctaatgcttcaaaacattggccatttcttggccctgatttctccaacttttgtgcaatcttatacataattggcaactccccagtgttggggccttcttctctcctgcatctcatggtgctgtgccatcttggttttctccccacttctctgacctcttctcttttttgcctctatttctcctccaacactgaaatgtaggcattggccaaggttttgcctttgccctgaatttttcctctgaataagctttttgatcttagccactaggctcagataatacctagcttcctgaatctgacgtgagcgttggcctcaaacttacaaattctttctggaggatgttgaccacctggagaactgaccatttcctaaaattaaaaacaaaaacaaactttgcagcttcctatgcaaatgacttctcttctgccttgtctctgttttactgattccttcatttcctacttacccaaatttgaaactctggaatgtctcctgattcctatttgtcccccaaatctagtcagtttaaaggcctctcaattatctatctacgatgtctctcctatctcttctgttacatttctgcagctatttgccaaatgcaaacactgtttaacctatccctggagcgattgcatcagcctccagaagaggttttcctccttcttgccctctgctcagaagcatttagagttccccgtttcctccctgcctcggtctgtgcttcttggctttccctaaggaagtaaccatttttaactagaataagtaggggagccacaggaggccaaataaggagataagggcagataaggccttctctctggccttatcccctgtggctcccttatctattctagccaaaaatggtcactttctagttcttgaagctcactcctccttttcccagccccatgcctgtgcataggatgtttccttcacaggtgtggtgggggtaaatgccctttacacacctgagactccatgtcaaaatgttacttatcatcctagttctacctgaaatgatgcttccttcatgaagccatttttgataaccagccaccaagtaaatgcggtctttctttctccgtcctctgacacttctcagaaccgtttttatacttcattcatgttccttatgctattctgtattgtgttgtaatcattaatattattccactattctcccaagatcatacagtagttacagagactagtattgtttttctactgctcagagccgagtttagtgttttgcatatagtaggtgctgtatttgccaaattgaattggccaatggacatccagtgagtcttctccaattggccaattgacaaccaatgagtcttctccagttagccaatggacatccaattagacttctccagtgtgttcctccagcacaggaagaccaagtcagctctctggacaaaggcttaacttaatcatactgtaaaatgctcacttattcttctcatttacatggtaaacccttcattttcctgggtagtgagtcagacttacatattccccctaaaaacctctatttttaaaagcttgaatttttacatttgagtagctctagctacatctcaaaaaatctgcagagatagtgcttggctgaaagtttttctttctgtcttacagtcgtctccataatctgttttggagttgaacgcataaaatgtattaatgttgtaggcatacgtcctgattgctgagtgttttctgacatccccacaactcttgggactttgtgtcacaattctgtaaacttggtctattgtatattcacatctgggctcaggtccaaaccacctttacataaattaaacacaaataatttagagcctgcttccgttccagctggcaaccccagtaaatgcacatgttaacttcacagcaggcttgccagggaagaggcagaaagtgaatttcttcattagagaagttaacatgggatgcgttccttgaagaatggtgtaaatatgtcagtccataccaccagaaaaataacaagcctcctgtcctagacaaagatgctacttggaggaactagcccaggcctgcttgtttctggagggggcaatgagaggattccactgctgcctgggctctcccctctccctccataccagtgtttcctaagtgtttcttaaggcgtgtggcacaatgtgttcatgccagcccaagaggaagaggcaaagtagtagatgtatgatgacacctacaacaggcaaacccagcctccacagctggttttatctttcttactagctcttcaatgttactctcttacacttagttttccgcaatatttccaaatgtttctgttatctgtctattttagaaacaaacagaaagcactccctccttctcacctctctagtttgtctgcaaccatagaaaagaatgatttacatgacgctggacacagtggctcatgcctgtaatcccaatactttgggagaccaagatgggaggatggcgtgaggccaggagtttgagaacagcctgggcaataccgtctctataaaaacttttaaaaaattagccaagcatggtgccatgcgcccgtagtcttagttactcgggaggctgtggaggaaggatcacggtaaccccaggagttcaaggctgcagtgagccatgatcacaccactgcactctagcctgggccacagtgcaacagtctacctctgaaaatagagagagagagaggagggagggagggagggagggaggaatagaaagaaagaaagagagagagaaagagagagagagaaggaaggaaggaaaacgaaaggagggagggagggaaagagagaaaggagggagagagggagggaaggaaggaaggaaggaaggaacttacgtaataaactaataaacgtttgcatttccatttccatgggatgaaagacaaaagactgtctggggcagaggcagaagcttctcttgattgtgccctcagctttgtctccttggtgcccgtcctgtgtggaccatgtccgtagctctctcaagaaatttgctcagttaacggtgcggtcttcatgtgtgatgcccgcaggtactcattgtgatcctgagttctaggaatcacttgagctctaattagctgtgagctcaagtattgagactttctgggcctttgtctcttcatctgtgaaatgagaggaatgaagctcttctctttaagcacttttgtctctaaagtaacaggattctaattctccagaaaaaatcctcctgccatagagcatattacaaagatgtcttttttttttaacttttaatttttgggtatgtagcagatgtatacattactggggtacatgagctattttgatacaggcctacaatgtgtaataatcagagatgtcttttctgacagctgaggctggtcctgatccctggggctttctttggtctttgcaagaccctccctactttttgctttcttcttccctagatccaagctgctgttccagcccagcccagaccctccttgacttttgcaacacagccttctcttccttcctactcatatttcactgagacacatgttttatgtcagttttcaacccctaagtggtatcagacgttttagaccttgttttggcaaaatttattctaaggaattgcctactttttcacctagaccttagtcttacccatgaacagatgcattttatctaatcagttatttagaagaactgagaatgtggtcttctgaaatacacatgtattgttctgctgttgttgaatataacattcacagtcagtagaaattccatacatgagtgattggtttggtcttcaaactacaggagccgcaaaccaagtttgaggtgtgctttaagtgcaattgataacctgagtattaacccaaactcggatttgatcactaacacaaaagtagcttttacctgatctttttattcaacatagctcattaacattagcttgtaaagaagagaaattactttgaaaaaaaaaccacaaaggaatgacaacagcgattttgttaatgaatcccacctcactctttgtgtctcaaaggcagcgtaagcaaagtaataagctatgtatctatttggaaaacagtctcaaattaaggagcttattcagatgccattgtaaaaataattttctgaaattgtggtctatcaacaggagataagatggcactttgttgttgcctgcagaggcccattagaaatattctatttcagaagcaaatcacactgtaaataccacgttcagattcatttattcctacaatagcatttttgcaaaggtgcaatttcataatttgacttagcactgatagtccatcatcatttcgaagctctttgtaaccactggttaattcacacatccttgggaaatggtttagttgtaccagacccatttttaaaggaaatgcccaaaatgtataatgataaagtagcttttcaaaggctaaacaaggacacagatgtgttttaaacttgttttctttctgaatgtgtccttagcacatctgactagaaaattctgagcaatttaaacatagatgtgtttgtcaccaataaagactaaagagccctattaatgattcaattacagacaggaaacttgatttaaaaaataattaaaataataaatgcaattccttcaagatgcaaatgtaaacaggacctaaaatgagtgaatatattaattgcacttttctcctccatttggtcctcctgagccatatttttgttaaagcaagtgctcaacagaggactaacttctaaagttattcagctaattcccagcattcattggaaaatgtctagtatttctaaacactgttatgagaaaaaaaggatttgaactgtcaactcccattatttttgtcattacacctttcctgagactggccttgcgacttaaactgttcctgtttcttatcaatgttgttttagggtttggtttatatgtggaatattatacaagtcctgagattgatgttgaacatgaggtcatggttaaacattcatcacaacatgtgcttaaaaatatatataagtggtaataaattcagaacttacaaactcagaaattgagggagattcaggcactttcccaagcattgtttcttgggacaccagaattcttcttctgaaaacttcatttgttgcttactaccacattcattcattcattcaataaatatttattgaccaaccagtatgtgccgatcactgtgacagctgatagcgatagtgatagagacagtgatagatcagtgaacaaaacaggcatcattctctgcccttgtgatatttattctctagaaagacactgacaagtagaagagacctgctactcaggggctgttctccgagtggcctccatgcctttccagcttgcagaacctcattatcttcatctgcagcccccaaggcaggcccacctgggacctagatcatgctctaaacaagacgcatataaaaaacatctggcagaggcaattgttggctgaggatcaggtttgttcctggttgctggtgctctctacttgtaaccctctgctggggtcctagaccctctgagattcagccatcagctggaatactcttgtttcccaaggtcactcaatcccccgaccctggacacttgactagcatatgcgtattctccatgttagacaccctctgctagctctaacttagatgtttgtcttctttgcctataattctaggtcccaatcaacccctttacactcaccagcctgctgtgcctcatactctggaatgacaggccttatctcttcaaaggggactgaaccaagtcagctctgactttttggaattggtttatggtcttggcgtcattttactgactcttcaagtggcacaaattgaacagaaacaataaatagaaactgtaggtcgtcttttcttccccacatcccaagccggggtctaaaaataataattatccaataaatgttaaaaactaaatacattagtagaatgctttgtctttccatttcacgcttatttcttcccacgaaagaaccccagccactctctgaaggtgactggcggcagtaaaattagaaagaaaggtacgtcctgaaggaaacatggaaaggactccaccagtgatagaatttgagaggagatggaggccaggatgttaatgatgatacaaatgtttccatctttgggtccgaaagaacagtggtactagtaacactaagagtaaataaagcagctgggcgcggtggctcactcctgtaatcctagcactttgggaggccaagtcgagtgaatcacttgaggtcaggagttcaaaatcagcctggccatcatggtaaaaccccgtctctactaaaaatgcaaaaattagctaggcgtggtggtgcacacctgtaatcccagctactcgggaggctgaggcaggagaatcgcttgaacctgggaggcggaggttgcagtgagccgagatggtgccattgcacactagcctgggcgacagagcaagactctgtctcgaaaaaaaaaaaaaaaaaaaggccgggcgcagtggctcacgcctgtaatcccagcactttcggaggccgaggcgggcagatcatgaggtcaggagatcaagaccatcctggttaacacggtgaaaccccgtctctactaaaaatacaaaaaaaattagccgggcgtggtggcgggcgtctgtagtcccagatactcaggaggctgaggcaggagaatggcgtgaacccgggaggcggaggttgcagtgagcggagatcgcgccactgcactccagcctgggcgacagagcgagactccgtctcaaaaaaaaaaaaaaaggcaaatacagcaagagagtaggtcctatttcgaacattttgagaggcttttaaacattgcaggtagagatgtgcaaaaaagaacttgagaaacgggaaactgggcaaagctggacatagaaatgtgggaatcacttgttggctaaagctgtagaaattgacttttcgtagaagggcaaggagaaaaagaaaagaaataaatgtctcgagaaaaagcccccttgatgggatggattaaggttagagggtgttccaaggacaatgggaaggcgttatgagagaggtaccagttacaacagtgtcttgctacagaaagctgctgatgtgagcatttcaaaaacggaagcattgttcacagtgtcaggtgctagaaagaaatacaggaaattgtggacatgggcgatacagtaactaggctcaccaggacccttgaggcagcagcttcacccagcccttggggcagtacatcctaacacagacattcagcattgaatgcatatgaagagacaccgcgcatttctttggatttgaaagaaatacacgcagaacattctaagacattcgaagcaagatgatcaagatctacggtgataaaaatgtatttcaccatgtagtcttaagaggaagggtggaattaacttggaaaacttatgtagccctctcacagagggcaaatatgtttgatatcacttaatacttctgactgattagtagtggccatctgtagtacatttgagaaacttcttagaaagaaatggcttaataggttgcagtgttcagtgtgggcaagaggaaaaagtggcagcacaagtgccccaaaactgccatctctgctccatctatgaaaagataatgtgattcataaaaataatattttagaaaatatttaatttttattacattaaaaagtggactgttttggaaataggttaatactcatttttaaatgggtactaactttatttggggctaacatttctataaattaagaagaactttatttgggactaacattttcataaattaaacaaaaaggcatgtatatttatttttcttgagcacaaaattatctgaaatgaattttaaaatatatatttttggcatatattctttctgcttattttctttgcatttagaaatatgcattttttaaaaaaattgaggccaggcatggtggctcacacctgtaatcccagcactttgggaggccaagtcaggcagatcatttgaggtcaggagttcaagaccagccaggccaacatagtgacaccccatctctactaaaagtacaaaaaaattagctggacatagtgatgcatgcccataatcccagctactccagaggctgaggcaggagactcacttgaacccgggaggcagaggctgcagtgagccgagatcgcgccactaaactccagcgtgggcgacagagtgagactccatctcaaaaaaaaagaataatgagattattttctatagacagcttttatcctaccattttctcttgaaattacatgtaaaacattatattaggctcttaaatatatatattatatacatatatatgtatatatataaaacttttgttttatatataaacctgtacgtgtacaggtttgttatattggtaaattgcatgtcacaagggtttagtgtacagattattttgtcactcgggtaataagcacagtacacaataggtagttttttgatcctttccctcctcccaccctccatcctcaagtagaccctgctatctgttgttctttgcgcccatatgtattcaatgtttagctcccacttataaatgagaacatgcactattttattttctgttcgtgcactagttcatttaggatgatggcctccagctgcgtccatgttcctgaaaaggacatgatctcattcttttttatggctgcgtagtattccgtggtgtacatgcaccacattttctttattcagtctgccattgatgggcttgtagattgattccatgtatttgctattgctaatagtgctataaagaacatatgtgtgcatgtgtctttatggtagaatgatttatattcctttgggtatatacccagtaatgagattactgggtcaaatggtaattctttaaatatttttaaaaacaagcatttggtaaatcacatctttctaaaataatttttatctaaatggcctagaatatttaggacattttcaatttttcaagattataaataattataaattatgatggaatgaacatctgtatgcataaatcttgatgtatgcttagggatttctttagaagagatttctagaagtgtggttgctgaactaaagaataaaaccagtattaagactcttgatatatactccaatttgctttagaagataattcatggaggtaggggaggttggggaggtttactttaaaactatatctatgttttcaaagaaattgatttttttttatggcacaaattgatattttaaatcaggaattggcacactttctgaaaacggccagataggaaatattttaggctttgcatgcaagacagcctcaatctcaactgttcagctcgtccgtcatactgtgaaagtagccatagacaataggcaaatgaatgagcatggttgtgttccaataaaactttatttacaaaaacaagcagtcagataggtttgatctacaggccatagtttgctgacctctgtcttaattgagagtcctgttgttttgtgaaaatatttgaattgtgactgtcaagaattgggaggcatgctttgcaaaattccctttatgaagatttgagcctatgggatcatgaatcctagttatagtcttgggaagggagtaaatctgcttttgttgcaaagcgatttggaaactaagcaaggaagctatgaatcagcctgtcatttcaacatatgcagagtatggaaaagtccataaagttaggcttctgtttgcctctgtcaggcagctgtagctctgccctgagtcttttctttgtgtactttcttgagaaattcagtccaactcccacaaaagtaatcacaaccatgtttgcaagttaatttcacacaatattgattcaatcaaagtctctatcactcattaattccagcatttctacacaattcctaggaaaacaaagcttgaagctgcaaggaaagagtcatctgagaaataactttgttctcatgaaacctaccccattgggaatatttttcccagatgttaggcatacagttgcttttccttaggtgaccctttattgagcagctaaaagacatcattgactacctttaacaaaagtgtaaataacaaaggaaatcaaccataatttctgaaataatatgtcttaattagcagttatctgtcaaggaaattgtaaactgaccacagggataagatatgttttaccatattaagtcgttgcctggcctgtcttaatctcttgttgcttctgaaggtgctttgaattcagaatctttatgtcaaaatagaggatgaaggaagctgctttcagtgattctcagatcttacatagatgcaggagcgtgcacacacacacacacacacacacacacacacccttctgacccgcagaatgcaaaagcagctgccttcgtaaacactacatcagagtccggcagtggtttaacactcattgtcctgcctcttttatttaagccagagaaacaatgtcagctggatgcagacagctctctgccatgaacagaagtgtttttgcaggctagcccaagcaagtcacaaagagttggggggaaaaatggatttagcctttgcaaattaatataaacaatcacttccctacatgtatgacagctggagtgaaaattttggttagaaatattttttactggcctggcacggtggcacgcctgtaatcccagcactttgggaggctgaggcaggcagatcacgaggtgaggagttcgagaccagcctggccaacatggtgaaaccccatctctactaaaaatacaaaaattagccgggcgtggtggtatgtgcctgtagtcccagctactcgggaggctgaggcagaagaatctcttgaacccaggaggcggaagttgcagtgagctgagatcatgccattgcactccagcctgggcaacacagtgagactctatctcaaagaaaaaagaaaaaaagaacagatttttttttttttttacaaagagatcccaaaattgtgttcccgttatcatagacttttagtcatggtatatgattttttaaacctatagaattttacccatgtactgtttggcagctaacggagaatctgacctctctagttgatgggtagagaaagtggagtttaggcaggaagtgacttgcccagtgagtgggtccacagtgagaacttggttcccaggattcccgagacaacgatcccctcactgaacacacttgtcttcagccatattgctttccctacttcttacttttccaggtaatgcataatcacgatctggtgtttgggagtgcatgcacccattttgcagctagaccttcaggggtttataacttatgctgtgtcatccttaagggcagaacagggaccaatgggtagaaattatagccctaatataccatgaaaaggtttccaacatgcatcaattattattttcctaggatgtccacattatatcttgagctattttgacttgaaaggtgcacaaaaattttttaaatcatttttgtagattatatatgtttgtaaagtgccatccagcacattggaatagttattcacctaaatatatgatagcagatcttcagcactgagttaccaatgagatcacactaaatcattgattcacattctcctccccatgtgctatggagtagtttattgtactaccacaaagtgctcatgcctaggctggcagaacacaccatcatggagcacaatgctctacagcaagtcattcttcaatttcaaagaatcgattggactgtttacattactttaagtcaatctggttgcatggatgcttctgctttttgaatgtcattgcttagactcaagacatatgggtttctacgctatttctactcgtgtgacagactgcctcgaaaagcagcgagctccccttccaccagaagctttcaaggggtggccagatgccatctgtgaggagtgccatgcatttctgtaaagcctcagacctagactgaattggatccacaaataaatggggaggagtcgactgttgaatgccaaccatgtggtcttttgtttagatggggtcattctcatttcatcccccagagaacataaggaaagacacagcttattgcaaagctctgtttgagttgaataatgtcattggaatggctgctaggggaccatcatcatacactggggttctggtgccctagtgctaaagagtgggaagaccagtgaggtcataattggtaataagtaaataaataggctttcctttttgaaaacccttgaaagaggggtctatgagaagggtcttatagaacaggacagggttgactgacagagaactcacagaaagcaaaactctccgaggtttccttttggtagtattggttttcctccccattgtcttcttagctttctcaattttttgctgtggtgaaatagtccatctgggggagggaatttcattcaaagaaagaaaagtcaatcagtgaaagaagacggaatggagaccagaaatagaaagaattttaatgagaacatgtcttgggtcaactcctaacctaattaccatgatgtctttccgttattttcaactatttggcctgggtgtgtgtgttaaccaaatgacattgagttatttcccagaacagctaagtgccacacaggaaatacttgctgcttcatgtgatttggttgaatccccaatttatagcttgaaggaaaaacagattctcaagatttgggaaaaaatcagaacctacatttcttatttctcattgtcatgacaatattatttgatgttaatcagagaaaacactggagcttatatcagtgtatatcatatgccagtatcatagtgagtactacacgggtatagaaagatggacaatgacttgtttattgtccttgaaggggtcacggtcaagtggggagtcaggacttgcaaacagatatgttatatcttaagaaggtgaatgctataactaaaatgtaaataaaatgttttctaagttggttctcagtctgtttgctaaatgtgcaaaagcacatttaacatttactttcttatcattaaccaccaacctctgacttcgagacactgaaacagacagaacagccatctgcaagttctggcttcatcattttgtttccttattacaatgaagtaaggcccaggtcattgtcaattagaaatgaaataaagtagagtttaaatacgaaactgtttaccgatgctcgtacctaaaaagtatggaaggaaggggcgaagaactacgctataatcccctgggattgaaaagtttataatctatttcaaaagatgaagtttatccaaataatgagatagtaaatggaagaagataatttattaagtgccctctgagtggtgcagagaaatctacgataagaattcaaagcatcctttcttcttgtcaggtaattaacaaagaaggatgtgttccaagataagatgcattcaggaaagaaggtctttcgaaaatgtttgtttgtttgttttggtacactttgatctactcacccagtttagaaagaaggtagaggaaaagctttgttctctccctcacttcactcttccatggcaaggttcagagacaggtgtgattaactagaaataaatgcaaaattcttgagtgactcttgagggacagctttttgcctgaactggttagctcataatgaaatcacgggggaaagattcgctgccttggacaaagatgtacccaactttgaaattatgagctgtgactctaaagttgaccctaaaaacagacctaagcagtccttttacatggaatgatgtctccaactaggaagtcattgactatcctcccatttctcaaaaacaggccacttaccaaccatggggataaaactaaacttttttggtggaagtcattattcttatttccaacctctgagaccctcaaggttgctggggctcttcatgcagtccttctgtccctctttcatattctgaactgatgtttgcttcgctcaccctccctggctgctaaccaggaggggacccctgccagggccattgctcagaggaatctttgtgtttctccaagccctacctcctcattaacagcagagcagctgcaacttacttctcctgcaacttcatggagtcctggcaaattgcctgtcacctctgccatagatacctagtaatgtaccctccaacagaggatctcatctggaaaataagagtggctggcaatttaggggaagttcttatccaatagccatcttttgatcaaggaggagcccacaacctcagaggaaatctttcctgtttacagacttctggggctttgaaagccctggtaggctgtgggccagccatccttagcttttacgcaaaggggccaaacaggatgagaccaggatggaaactgcatatcataggaacccagaagggcaggaagtaacaacataagaaggaattcttgattaaaagcacagttagaaggttggtgttgggtggggtaggggataatgacattaaaatgcgtctagtttgtatgtgtgtttgttataataaagccattagcccatctccttcagttgcgtttccgttgttacattattcttcactttggagaaattggaaatttttttttattatacagagactctgtactaagtagtctatttggaggaaaatcaaaactcctttctctctctctctgtctcttgctctctttttctttctttttataaattctctatgtgaaatagaacctaggaaagaccttgttatcctttgcagaattcattattctagaactaattattgggatattgaaaataagcaatgtttataaagggtaaagttgctatccatatgttctttctacacttattccccaagaatgacacagatgtttgtgaactttttaaaaaacgaatcgctcaaaaagtggcattattatgaaaggaacaatttttctccaaaaacttttttttcttggtgttgtttgctgttgaaatcctgcttgtggagtagggatgtccaaaaaacacccctttaattttttaattcctctcctgacaccaccacagggcatatgagtggctgagagtcacgcgcactggccccatgtccacacaacacagtggaccgtgatcgtctttttccagacagaagtcagtagtaacatgttttatcattgtactcctatgccaaccagagaataaattgtcgttaccagatggttcagtgttgcagaaaatgtgttcctacagaattctgcatcagcctccttgacttccaccctgcaggtgatatttatggactgtttacaagttgctcacatatggcattctaaagaggtttgtaacttttatacgctgtcatccagtttatttattttatgaaaattccactccaaaggtcacccttgttccacctacctccctaacttcaggccaaagagaaaatcctgaatgtaatctcaggacagaggagccaagcgaacaggctgtcaagccctcgacattcagttctccccatgcaccaaactctgctcctctggactgcaggcataacccaaatgaggacagcaccgagcctctctcctatttgaataatacaacatttgtgttgttttgtgtggcaacgtcctgatttggactttgttcggctcccatggaggagagaatggggcagcaaccccatggaaaggggtgcagccagtatgaaccccaaaaatctgagacaggtctcagttaatttagaaagtttatttcgccaatgttgaggatgcatgcccatgacacaggtcctgatgacatgtgcccaaggtggtcagggcacagcttgctttaatacattttagggagacatgagacatcaatcaacatatgtaagatgaacattggttcagtctggaaagggcaggagaactcgaagtaaaggcgggacaactcaaagcaggggaggggcttccaggtcaaaggtagataagagacaaatggttgcattcttttgagtttctgactagcctctccaaaggaggcaatcaaataagcatttatctctgtgagcagaggggtgactttgaatacaatgggaggcaggtttgccctgagcagttcccagcttcacctttccctttagcttagtgatttgggcgccccaagatttattttcctttcccaccagcattgggggttgagatgtgcacacactcaggaaccactgcagcatcctcctgtcagataatcctgcctgattctgtccaggccgggcgggaggaactcgaactctttggaaatcctctcctggccgctgtccaaagtggagccttagagctcccacctgatgcagtgacagatttgtacctgagttctttctgacacagatgcactttgttgatggacatttgcatccttcactatgtttctccttccaggtggacactcttgaagtgtgtagaaattttattgctgttagaagaccaatgaaaataggagagaaggaactttcttgtccccttgaaagctcgttggtgattggaaacactttgacaccaaggttagaagaaaactctaggcctaaatgtacacagggtgtccccgtgatagcaaagaaaagagaaggagcaggttgtacaggaatacaggggactgtgaagatgctagacattgtgaaagtcaagcaaagtgttcatcttgatttggtaggaaatgggagttagcaggcagttcagagtgtgaactttttcgagtggctttctaagtcaattttttacagccgtctctttagagaagtagagagcagtcaataaccaagagttcagatggagttcagggtccccctaaagtccccagcttctatcaaggcagcgaggatctctccaggattctcaagcaagcatcgtcatcagaatcaattacctgtagcaattggtttattttttttagagacggggtctctctctgtcatgcagtctggagagcagtgatgcaatcatagctcactgcagcctcaaactcctgggctcaagggagcctcctgcttcagactcttcagtagctgggaccacaagtgcgtgccactaaaaccagccgatttttaaattttatttgtttgtagagactggggtctcactatgttgcccaggctggtcttgacctcctggccgcaagcaatcctcccacctcagcctctcaaagtgctggcattacaggtgtgagccaccacgccctgtcacctgtaacaaattttttcaaaaaatacctagaagtgggcctgcctcagacatcttgatctgaaatcctgggatggttgtcaggcaaggatcagaggcaattctggggagtacaacagattgaagggcctgtttcagcagctggtgtctgacccaaaagctggtatgttgtgctcagcctgcagtgctgatggactcctgcttggaagagctatgaatacaaagaagataggtagttctaaggattggggcagggtcaggggggcagggactgctttgtagggtggggtgcaggtttggctcattttctagaaaaggcgtagcatcgttttcagatcagtaactttgggtcagacagagccagggttagacacttcctctgtgaccttgagcaatgtaacctcatcatgcctcatttatctcagtgaccaagtggggctaaaaatagtgcctaccttgtggggtccttaaagtataaaacaaaccaagcttatgcagcaaagtacctagtgaagttcccagcacaaataagtgctcaatgcatggtaggtagaagtagtaatagcagtagtggtggtggtgagagtattttgattagtgggaagaatatgaaacttttattctgacaacattctagcctaggcctggaatatgacagctagaattcgtgtggtgtctacggtgtgcctggtggtatgcgtgtaaatataatctttaatcgccacaagtacactgcaagatactatctttctcatcttacaaaggaggaaactaagtataaaaagatgaaaagatctgcctaagaatacataacttgaaatggcagaacaagggcttagaggcagctgcctctgatgccaaaaccaacatgcagccaaggacgatgcctggccagatacagaattatgagacctcctgctccccagccagcaaggaggagatttgcggagttcttgtcttcataacggatgctactggggttctttccagggtagtaagtgaaaagcagttggagatcttgggaattcaggcactctatatggttagaacattaaatgggcccatcgtcttccaggctgaaaattcatgaggtgtttctcagtgtaaagagtggccgtgaagaatagcccagcgccagaacaggagggtgagagctgtctgtgtgtacagcccattcttccgatccatgagatgagactctctacgccctggcagtaaaccccagtgaagcagagatgacagaggtctacctgattacccagcagggagtcactagtcacccagtgtagaaataagtttaatgtcactttcacacactgttcctgggacgagtgttgaaaatatatgctttcttgcaagttccttttcaacaactgaaaaaatatttccagaggatcccaagatctcaaaaacttgcttggctccatacaaacatgtgtattttcgtgcctgccaaaatgagcaagattaacaggataactgaattttgactgtgaactgaagttgatgagtatagtatcaacaggaaaatgtggcactagttttcagaagataatatgattccaggggattttttttttcttagaatagcatcctagaatctggttttcatagggcaggagaccatacccccatctaactgtaggatcccagaaaatcatcaaggggtgacagcctctgttccttcctctcctccttctccctctgccgtcaggacagagggtagtaaatcctgcctttaaacctcaaagtgtttgaaggaaaagtaggtttcttggaacaagatgtactttttttttttttttttttttgagacaaagtctcgctctgtctcccagactggagtgcagtggcacagtctcagctcactgcaacctctgcctcctgggttcaagcaattctcctgcctcagccttccaagtagactgggactacaggcacatgccaccaaacccagctaatttttgtatttttagtagggacagggtttcaccatgttggccaggctggtcttggactcctgacttcaggtgatccacccaccttggcttcccaaattgctgggatgagaggcgtgagccaccgctcccagccatgtactttagccacgtaagatataaggtaggaaatacaattttcagaggccccagtaatgttccagaatcgttatattccatccaaatctaaagaaactgacaaattcattgcaaatggcttttaagaacatccttggagaaaaactaccaactcataggttccaaatgcaatatttatccctcagaagtgtgctgcttcctgcaataaggcacacaaccccaacccacagccttgactaaatttaccataacttaagtggcatcaggtagagagatgttcagtgcttgctttgcattacagcttatgttggcttccaatttgtgatttataatcaattcttaggatatttaaagagctcaatgaaaggtttttctttgtttaaattggttttttattcttttttttttcttttggcacgatcttggctgactgcaaactccgcctcctgggttcaagtgattctcctgcttaagcctctcaagtagctgggactacaggcatgcaccaccatgctcggctaatttttgtatttttagtagaggcggggtttcgccatgttggccatactggtcttgaactcctggcctcagatgatccatctgcctcagcctcccaaattgctgggattacaggcatgagcaaccacgcccagcctaaattggattattaagactgaaatgctagccttgatgtctgggctctgctggcccagtgccttcccagggactcactgactcttgcctaaaccaatctaggggtgaagccttggaacacaaagctgccaaattaccttttcccatcccctctgaagcttggaggtcagaagggacccctcatgcctccagctgagcagttactgctggggatcaaccctccccagggccccgtctgtatccagacctcctgcaagggtccaaaaacatcttgtccttcttctcttcaaagaataggtctgttctgaggattccagatggctctgggctggcttgggtgtaaggagcaggattaagatgaaaagagtactttttcctaaaaccacttaaagtaactaaaagaaaaggagaccagaaggctccagaacaaacttactagggaggcaacctggcttcaaacaggccttcctgtctggccgtgggttcctgtcctcactgaaaggcccgaggatggagctgaaagaaaacacagtatttccccaacttaaggaatgtatgaccctcttttaaagggaaacatttccaaggatctttggtgttgaagatcactcttttattctaatcttattatatacctacaaaaaattcactcacacatttttttacccttagtattcccatacaacaaatgagtccaagcaactttacacactaatcccaacataactacaaaacccaaacactcagatgacaacattaatttggtgtgatgactgatggcattttgtagaagcaaaattcctgttattgggtaatatactagtagaacgtacttgcactttaggctttgcttgttattaacttaatttccttgagttttagcataataggcagcccttttagccatcattattgcctttgctgtttatttttatgtatttgctttttatcttttaatttgttttatctactaacaggccaaatgatctaatggtgtacccccaaaatataatacagggagaaaaatcttttgtttttttgagactgggtttcactttattgcccacactgagtgcagtgatatgatcatggctcactgcagcctcaacctcctgggctcaagtgatcctcacacctcagcctcccaagtagctgggactacaggtgtgcaccaccatgcctgactaacttaaaaattgttttgtagagacaggatctggctcttttgcccaggctggtctggaactcctgtactcaagcagtcctcccacctcagcctcccaaaatgctgagattacaggcgtgagccactgcacctggtctgggaagaaaatcttctaatggaaagttcttcactgcctatttatgtctagactgaccacgaatgaactgttgcttatcaattgtccacagacttgaacatgctgccaaaggccaggatgcggggtctttcgagttcagatccatgttactcctgtgttcccaagtgatggctcacctctcccaccactgttttatttttgaacaactggaaaaccttggctatatagggattcatgctttcctatcaccgcacttggcagtcattcaatcatcaacacaaacatatgtgttgctacaaaaagacatggcagtactccttatatggtacctgtctaggtgctccacaatgggtataactgccatttttagaagataatcacaaaaatgaaaatctaagatttttaaattatttgataactgtggggcacttgaagaatgctttgcttgagacccattgcccaaagttgatgtagtatataggtggcatcaggacaagtcagagaccctgggctatgatgaaacccaaacacagcataactgtttttgaatcatgatgtgtttgttgttaatcaaaagggccttagagatcttctagggtaatccccttaggttgcagatgaggaaacgaaggcccagagaggtgaagttctgtcccaggttcccttacgcctggtgaacccttcagggtttcacaaaaatggcattttccttcttatcttcctcattaactttgagatacttactcttctggtccccttggctctcttagcacagttattaggacatagattttttttttttttttttgagacggagtttcactcttgttgtccaggctgaactgcagtggcggatgtcaactcaccacaatctctgcctcccgggttcgagtgattctcctgcctcagcctcccgagtagctgggattacaggcgtgtgccaccaatgaccggctaattttgtatttttagtagagatgaggtttctccatgttggtcaggctggtctcgaactcccgacctcaggagatccgccctcttcggcctcccaaagtgctgggattacaggcgtgagccactgtgcctggccaggacatagattttgataaagcattgctctgcaaagacatcaactccatgaagaacagtgatgcacatttgcaggaagctaaatgccaggtcacactctggctatattctcacattctaagaactcatccccaaatcccacactcactgaagcgtttgagatatgtaggacccccaccatgacataaaactgcacatgcacttgaaaattactaagcgatcagcatgttatttggaaggaatcacactgattttgactcgaggttgcaaagcccacagattctacttagatccatttgctcacacaccagcattgttcaatagtaatgtaaaatgaagagtgtattttagttggtatttgcgacctctttgggttgtcctgaggttaattctgaagaaagcacattatccgtgctatgactgtgacagacaaaagaattcacgttgagtatggatgagtgaaatccattcattcacatggatattcagaaattgataaaatccatcgtgtggtaatagtgccacatctttcttatgcaaatcagctaagttttaaagaattttattgggttttgagcacgtgtgtgtgtgcatgcacgcgagcacgtttttagcagatggcaggcattcttccttcaaaaataacgaacatgttttctgttttctctcccctctttgctgaatgctgagtgagtgtgttttaatagaaaaagcagagaatccagaatccagtgctgactttgctgtggacggttggtcgtgtgacctttagcagcccacataacttacggggggctctgtttccttatcggtagcatttaggggtcagagaagatgccctccaaattctcctctgtaattccggtccgtgacagttttccttgtttctggcacaatgaaattaattgtatgtgactgaattcatgaaaagagagttaccatccccattataaagatgcaacagtccaaacaggttgtaaaattctaaggaggcccctgtttctgttttcctctgcactggctgccaagatatgtactaaagaagttaaagtttgtcaggccaaaaatattccagggaaggaaaagcctgggaaaaaagctcctgtctggaccattgtgttcaagttaatattttataaatgtttcttacctcatctgaaaaaataaggaatttaagtattccagataaaagtagattttattattttagtattcatgatctcaaactgaaacaagacaaatcggaagcctgtcttctaaaattttcttgaaggtaggggttatggactacagaaatgaggtcatagggaagctgtggaattactttcattggcgggctttttttttttttgagatggagtctcactctgttgcccaggccagagtgcaatggcacgatctcggctcactgcaacctctgcctcccgagttcaggcaattctccaggctcagccctgagtaggtgagattacaggtgtgtgccaccacacccagctaatttttgtatttttagtagagacagggtttcaccatgttggccaggctggtctcgaacttctgacctcaggtaacccacccacctcggcctcccaaagtgctgggattacaggcatgagccaccgtcgttggcaggttttacaaacaggacagatacaaatctgcttatctgctggaactggattaggttggacaaatgaactcttcagggcctttcaagccctacgttaagattgccaccaaaattctcggatgccctctttcacctgctgggcttcagtgtcaaggtcagcatgtggtctatacatagacaacttactttcctctctacttatatttggaattaaacatgaaccaagaccatcagaacacttcaaaatgcatatatatttttttgaatgaagattttaaaaaccactttgtttatgtaaaaaaatatgctggaaagataagagggcctacaatcaagagtttgatattgtagaattttgctttccaagaacaattgggaaagaagtaaattagcagagaggatttgcattcttaatcgatacaagtgggaaaacctgtttgagaagtttatggaaaagtttaagatgagagtcagaagacatgggttttctgacttcacaactaaatctgtgggctgggcaccgtgactcatgcctgtaatcccagcactttgagaggctgaggtgggtggatcacttgagccagagagttcaaaaccagtatggacaacatggcaaaaccctgtctctacaaaatattagccacgtgtgatggcatgcacctgtagtcgtagctactctggaggctaagatgggaggatcacctgagcccaggatgtcgaggctacagtgagccgagattgcaccactgcactccagcctgggtgacagattgaggccctgcctcaaaaaacaaaatgaaaaacaaaacaaaacagacaaaaaaacctaactgtgatcttggccaacccaatctcttagagccttagcttccatatttgaaaataaggatatattgaaacagacaattttctagtttattttcaggtctatgactcttctaaattttccttcatttaattgattctctgcttccaaaaaacacttcgcaatctgtgttttaaatgttcatttacaaacaagtttccaatccctttgagtttacgtctagaattcatgccaacaccatatctatcaaaaattgtatatttgcatctgtttgatatgctcctactaatttcttactgaagtccaggtttccacaacacatttctgtttagtactggtctgtggttgctgttgttcatagttgtctggaaaagtcttgtctccaaattacagtggctttctttttcttgccctgaagcagcaaatgatgggagaaatatgtgtttgtttctgttcttcagagtcagagctgcttcaggcataaaattcttagccctctagtttaattcaaatgcaatgagtcacaaagtaaatgtgaactccgggctgtgtattgtggggattgggcaagttaaattaatttttagagccagattgcgttacttaaacctaggatcctaatttgcgctgacaaaaaccatcaaatcagcctgcagaggtgcctgaaacttactgcccagataatagctgacaatttgaacttggtagttttatggattggtttgtatctaaaaagcaggcagcttttaaaagccctgaataaaggttgctttctgtggacacctacggcgtgactatttataaaagcacccaatgatttttcccctcctaaaagtgctattggcagaatgaggcttggtatttaatccacaacccgctatgcactgccccctacagtggcaaagaacacgcagggctggaagaaagagatcaaggaagcattaaaaatgtcaggccacgagaccatgtttaaattattaggtgagatgccgtcttgcatttaacaatggccccacgcaccttgaggcccaacttcctctctccttggatgttttgacgggttattgcaatcttttctgaaattgaatttcagtttgcttcaatagcatttcccagtaaataggagtgactctggtatctcgtttgtgaatcttgatgtaataatcggaggtaattgaagcgtgcacaaaccacagagacttatgacatgtttttaaacaaggattgactgatacgaaactaattgaacaaaagctggaaatcagattcctccaagaaaccttgcacagaatacagggtctttcataatggcactgagtttgactttaaaagtggcgtgttcaagtttccttattttcctgaaggagtttaggagtaagttactgacaggcaaggttgtgacccaatgaccagagttaatcatctggcgactggaattaatcttttgtctgtcctgtggtttggattaaccagggtcggtcatcccctcatgccttggtggcccctatgaattaaaaaaaaaaaaaaaaaaacctcttggtaacaaagacacacaaaatgagcttcaaaggacagcattttgtcctctgaaggacaaactaaactagcacagatttggaaactttttattttgtaaattaatcttctgtagacagataagattgtaatattttatatttatgctcaagcatacacaaatatatgcacatatagacgtatcacatataggcattctatacatcctcaggttgcaaagtggctgcaggacttatattccatttcaatggaagttagatactaaaagggagaaataaaagaacaaaacctgtaatttacatatccaagctatgcaagagaccaagattattaaagcagggcgcacaatgctcctcagcccctggatttaaagtgggggtgaaaagcatttatagataagaatttgaaattcaaatgaaggaacaagtagtctgtctaaaatgctggcctccgcagatactgaccttccgtacaaaaggtagcggatttttattttcaggcactaaagaaaagagaatgaattgtgtgtcgtgcactcagattagtgataacgataaaacgtagcaaaccttttgatgcttggtgcctaattgaaggaaatagaggagagtggtaaagtaaggagtgaacatagccaggagaataattaacagcttcatcaggcaaaacttaccattcgtatgtgtatctaacacacgctaatgtcagttggattgagacttgatgtggagcaaatttctttaaaagataatgaattgccgctcttcgaggaacaatttgaaatgcgtcaatgtcacccttatttataacaccactagggaatggcaggaaagttgagatctaaacattttatttctctaaacaggagtcatgatgacgtggacctcattagagttatcactccacctgtggaaactaaaacagataagattgatataagcacctagggatttatagacgtaatacctattatcactaataggcgttaggtaacgaaatcccagaaggtcttggtgagactaagccccctaagtatttggcatgcccttctgaagagatgttgttgtcattatggctatttttataaggtttaatgtaattggaacaaaagcagtacaccccgccatgctttgagttttcccagaagtgatttatgtgatttgtagaaaaaaatgtctgaaagtttaaggtgttctcttccagagctagttcctaaacgatttagaagattctgtttaagtgttgttaaaagtatgaatataaaatagtttgactacctgggctatgcggtggttgttttagtttctcttgcaggttcattttctcagtagcatgaacttaatcccagggaaacaatactgtttttgattctcagaaaaatttagggtaagtaggaagatatttcctacctaaaagtatacattttatcagggaagtaaataaggcacacaagacccccctaaaaacagttgtagtgcaacatttggcaaacttttattccttggctcctactccctaattaagggttttatacattcaaggagaggaacatttacaggttattgagtaaaagaaaagcttcacagaataaatgaaccttgggtgggctttgaaagagtgagatttgaatcagcagcaataagaaaaaagaaacatctagaaagggatgccagaaaaattctctagttatctttagataagcgacatcaggctcttgcctttgtccttcaaaagaactaacatgccaggtgaggtggtgtgcctgtagtcccagctactcaggaggctgaggtgagaggatcacttgagcctaggcgttctgggctgtagtgcactgtgctgatgagatgtccacattaagttcagcatcgataatggtgacctccttggaacaggggaccaacagcttgcctaacgaggggtgaaccagcccaggttggaaacaaagcagctcaaaactcccatggtgatcagtagtgggattgtgcctatgaatagccactgcactccagccaaggcaacacagtgagactccatctctaagaaatgaaaaaagaactaacactatcccaagaatagtaactggtagggacttggggcagaaacatacccacaggattagccaaggcatgcctctttctatttgagctttaaaaatgaaaatcatgtggccaatacctggacatacatttgacctccaaatcaaccgttctaattttcattttaccctgacatttatctactaggatatatattttattttttaggactgtcatcaaagttcactttaaccaaatttagataccattctttaccaagtttgggttagggttagaaggaaaggcaccgtgttgtttgcaacccagaaaagctcgggctcacactctatcttgagacagctctgacgttgtgaatgggctaagcatgctcgagagaccatggcagacaagctgctatggaaatgtcctcaaatgatcttcagcagacacagcttccatttctcttaccttctccacagcacccatgctattgattgatatcctagtcacaggcagcaaggtccggacccaaggatgaggcattgactctgtctatgccattccttccactccagacacctctatgggcctctgggtgaagaatgcaggagttaattcagtagactcactagtcaggctaaagaattgcctgtgaaacccatggtcttatcaagtcaactagctatctcaatagtgatggggatatagctgcagtaaagatattctcatgtgtaacaggacaccacctgttcattctttctctccaagcttctaaaataatgacaagcataaaacctctttcagcttttcagaaaaatgggctatgtaaatataagctattactactttttccaccaaaaattatgtatgtcgtacatgctaagaatcctttcctgtttaattgcagagcatcatgagagtagaaatcagagcttctgctagtagtcttctaccatttgtatggaaaattgccatggaagaaatcaatattattactgttcaaatatttgcacagcctgtgtttaacgtgcctgtcacacattaatgagaaagtatttttgaagacattgtatttaaagaagaaaacttagaaaaacatcaagttgaagttattatttttaatgactgccaaattcaatgttacttctgctccagtagtatttgagctgttaacctgtgtttttgagtgtatgttcgttggtgaataattagggaggaattccttagtaagtaattgatataaagaccatttgactttgaaatttacaaaagcctattttaaatttaaaatttatgaaagttatgtgtgtgtttaattagtgaaaatgggtattttgcctatgtctgggaagggggattattgcaatctcagtcattaagaaaggtctcctgaatcaatgacatttttacagtgcagcaataatcttattatattacacacacgcaaaaatgttaaatggactataagatttggcatgaaattgcctagttgcttgggtgggggggcggagagaaaattcagcatagcaactaaacagctataaaaatagtcatgttctctgtccagaatttggagttcttggctggcatgcccagtttgtaaaagaaaagtcagcagaataagttaagtttgttctgtggcatcagaaagccaaccctcaaaatagatgtggaaaatgcttgtgttaaatggtcatccaggcatttctttggctctctggtgcttggggccatctatgggagacctggatcagcccttcattctgccctggacctctctccatttcctggatccttgctccaaagaatgatgggattatcttcattctcatcacaagactctacctctagattgcatggtcccagattagcaggaagggcagatgtaggaggaggatgtaggaatggagggaaaagcaaggcattcaagggataagaacacagaggggaagtctagtcatccatccttccctctgtgacacaggcttcccacacgttttgcagagcctgtgaaatacttacatgcatacttgccatccctgtcttgctaaagtaataacatctcaacaacctttatgcaattagagaagccgtttctttgcttatctgtgtttgggcctgtttcttaggtgtcagtctaataaatgagttctttaaatttttgtcttctcataataccataaaattagaaactcatcatagggaagtgaaatcacggtgcagataactgtaaggctgtcatgcagaagaggaattaaatgcagtcttaggatcaatgggtgggaatgacattaaatactgaagaaacaatagttgacggaacagattggaggcaaagtaaggaagacttggaatactcacccgggggtcaaagatgggatgagcttcctgtctggattcggaatttccccttcttgtaggttttctttgttgttgttgtttgttttgttttgttttgttttgttttgtttttgagatggagtctcgctccctcccccaggctggagtgcagtggctcaatcttggctccctgcagcctcagcctcccgggttcaagcagttctcctgcctcagcctccagagtagagtagctgggatttcaggcatgcaccaccatggctggtaattttgtatttttagtagatacgcggtttcaccatgttggccagtctggtctcaaactcctgacctcaggtgatcctctcacctcagctcccaaagtgctgggattacaacactgcacccagcccccttcctgtagggttttgagcaaggatgagaaatcctgtggtaggaatcttaaattagaagtggatcctaatgatcacgaaaaaatttctcatcatcacctagaaaatgagatgtcatgatttgtctttcatcagaatattgtggtaagttctaattcttctattataactggatctgaaatattgttccactccattgagtgttctgggctccagtttttccatctataaaatgcaaccttggtctattatatcttcccactgtaaaatattgcttagttctattcatggcggtcaccttaactctaagtagtaaaaccagggcattcttgattcctgctctcagggagacaaactagaggaaaacaagctaagtgcatttgtcagccttggttgagctctttttactaagtataggcacagtcttaggtatcagcatcgtacttgtttagccagaaacagttgctaaaacagtctttcaaagcactgagtcaaattaaatccttaatgttgaaggcagaataggagaaagaactagattgccaaatttatctctgtcttctcaaatgtatgttttcatctacaaagttgattctctccctgaatttttttattgcttctgatctgtgcttgtgcaaagtaaatgacttttcaaaatagcacatagcaagcccttcatgacggcactgattccataggtattatgtcataaaagggtcatgtgatcaatgagattggcgtatgttgggtttaaccaagttaattcagggtttcataactctcagagcctttaatttactgatataaattgtgaatattcatgaaaagaacattatttgcagcatttccctaattactatcaaaaaaaatttctcttgaagcattttataagactaataagaaaaagggagtaaacacaatagattagaaagtgatgaaaacaataatatgatctagggaatttgccgtaaagggaaaaaaaagaattaatgaaatatctgaaatatggggtatttttaaacatgacaatttcaggaacctgtaatgtttttaataagtttcaactggaaggatttccaaaaggcctgttttattgtacatttttaaatgagcacttatatgcccccaaataattcaagaactaaaatgctgaaaagtaagcttgttcctatctcttcctgtgactttatctacactatcaatcctcttaataaattttatgcataaagggcagtcaactgcagctgtctacattaaatgtattcaaagacattaagctgcttaaatataataaaaagctaagttattttacatattctggtttttagtaaaaacaaatcccctttttgctggaataataatctgtcaaagaaggtaaagaacaacattctctctccctttgcctacctgtcttgttgtcacagctgagacttaagtattatcagggggaattttttatacctttctctagcttctattgtgttaagagaagagtacatttggacatgtttgctttatgccacgttttactttagtgaacttgaccctattccattttttcctgttaggattgccataaggttatcttgggattgaggagcactttagatggtaggatgggggttgtatgttccccttgtttagtttgaaatgtgttcaaccacagagcccatttcagcaagctgcacctttgtgtggtcatatggttaaacttagctgagatggtgctcctgctcttaggtaatgtttatggccattgctttcctttcttctaaacacacaattactccttaaggtccatataaatcatgaggttacctagatcattacaatcctttcttctctccatgagtttgttcctaatatagagatagttaaaggtttgctgtacaccaattcattagtctataaggcaaatcagtgaaaagaaacaaaatcatgtaaaactactggctagacaataaacaatgattctctgaatcttttattttcacatgttgtcagatacaaaaaagctctagttgatatctgaagtattattgtacatccagagatatatttctcattatataaattattcactgcattacagattgattttgggcatatagaggatatttggcagaatagtaagactactagaagttcagtagtatggagctgatacacccaccttctgacttaatagaatttcaaaaaatgaaaaaaagaaaacggacaagtactctaagcatgaatgtatcagaatctaaaaatgatttatagcaaacagtatgctactttcaataaacactagagattacagaagaggaaactctctaatacatgatctgtttttctcatgtacatttcattctagcatcataaatattattaggtacatctctaaaagattcatatttcttggttgcggttatcttagcagtttgtacttcaaggaaactggaagggtctgttgaacaaaattgtgcaatttttacttaggttagtgcccactgcccatcttcttcaagttcaggtgcggtggctcacgcctgtaatcccagcactttgggaggctgagacaggtggatcatgaggtcaggagttcaagatcagcctggccaacatagtgaaaccctgtctctactgaaaatacaaaactcagctgggtgtggtggtgggcacctgtggtcccagctactcaggaggctgaggcaggagaattgctttaacccaagagatagaggtcgcagtgagccaagatcgtgccactgcattccaccctgggtgacagagcaagactctgccttcaaaaaaaaaaaagaaaagttcagctcaacctttcttttaatgttagtgccactaaaaggaagaagcatttaactggtgtcagtagacccatttttcttcaactattttttgctttttttaggaaaagatgacggtcattttaaggtaaaggacttccctgctccagaataaataatctcccttagttgatgctgaaaaggttctatggtagttactggggggtgaaaaaactttaaaaaataagaatttgccaactttaattcctgtagctttgattagcaaactacctagatccccactgaataattactaattaatcaggaggattttaaaaatatctttaaattagcacattaggtcctataatataaaacagaattattgcttcatttcttgtttccaaagaattaaaaagaaaatttgaggatcatgattttgtgatgcagtaagccggacgcactgcctttccagaactggaaattgcaccctagtgcctccaccataccaattaagggggctttttgagcaaattcagtgctgcacgctaatagcactaatccaactgcacttcattaaatcggttgggtacatcaatggaaacacttaacggatttcatgatttaaaaaaaaaaaacatactatggtatatataaattgctttatttaactccattactgacaatggttttaattgattgagctttgagagcaatgctagagcaaaactgactgtcattccaaacagtatttttcagaatatcaggctatggtcatattctgagagttggttatcttctaagtgatacagagtcccctgggagataacaatagctaaatttcctggactacctacactatagcctgttttgacccaatagtatacactgtggaaaacaaagctcttctccatttggttctctatgtatttgtctctctccttctctccatatcccaacctcacttggaaagggaccatcgaacacctacaagcgtcatgacatgtatgatttcgtttatttctccctgggattctgcaaggtaatcatcattttatccattttacagacgagccactgagactcacagaagtcagttagtgacctatccagggcacaagtcagtggcagtgtgaggacagattgactgagatcacagtcatccagttttggctgacttcactgccagatgtcaggtagatgtcacctcctttcctcattgtcccctgtgacactttgtgaggtgtcaaagatggtgatccttcttaatggaggagccgccttttggatcaaaggtgcaggagtggctcctgagcctgggaacaaagaacagaatccatttcttatggcctcaaccttctctctgcatgactgtgataaaaaaaaagtcagttcacttaaaaaaaattactttggaggctgggagtggtggctcacgcctgtaatctcagcactttgggaggccgagatgggtggattgcttgaagccaagagtacaagaccagcctggccaatgtggtgaagccctgtctctactaaaagtacaaaaattagctgggtgtggtggtgcttgcctgtaatcccagctacttgggaggctgaggcaggagaatcgcttgaaccttgtaggcagaggttgcagtaagccaagattgtgccactgcactccagcctgggtgacaaagtgagacttggtctcaaaaaaaaaaaaatttggaaggctgcagggagtggagcagagagaggagaatattctttatttctttttcttttcttgtcttttttttttttcttttgagacaaggtctcactttgtcacccaggctgaagttcagtggtgccatctcggttcaacctcccaggttcaagtgatcctcctgcctcagccccgcaagtagctaggactacaggcgtgtgccaccatgcccaactaatttttgtatttttggtagagacgggctttcaccacattgctcaggctggtctcaaactcctgaactcaagcagtctgcccacctcgacatcccaaagtgctgggattacaggtgtgagccacagcgcctgttggagaatattctttatagggaaaaaaccttcaaagtaaggatataaggacttaaagcaataagaaggaagtaaatatgtacaaaatgcctcctttatcacttcttgatggctggacttgctatataaactcttctagagacaatccatgaaagtaattgtatttttttttccctgaagaacagtggaaagttggcaaggagtaaaaattttctatgaaatagggaggtgaacaagttataaatgatgttaatatcttccagatggcacagttttacatgggaattgagtttattgtaattaaaggcatgtgaattttctacaaatactgaactttgcaagtctgacactagaagattccatcacttctggaacacagttgttttaagggaggcgttccttcccttccgtttaaaatgaatccttgggttttataatctgagctaaatcagagaaatattttcccatgtgaagggtggttttttaaaaaacaaaatcttcctggacaataaatcttaattatgaaatgaaactcctcagaaacaagaaatttagattccaaatatttttccattaacattgtatattttgatcaatatttaacaccatatgtcttgaattcttagatacatttatttttgagttaagctgttatcacttttctgtctctagacgtgtgttgggcaatcttggagcttctggttttgcttcaatcaggagagtgtggctcaatccattatcctgctttcctattcattgtgaacaatgcctataggctcagagctcccaaaccgacagtcactatgatgagaggacattgaaatagcctctgccatcacttgcttcccagtcctgcccttggctttaccctggacccgactaccctttgctgtatcagaagatggagcagatgatccctcctcccttcagtacctatcacagctttcaatctccacgtgtcctagcagagcgtggtcttagtggtaggcagaattccaagagggtccccaagatccgcagcccctcatatccacacactgtctcccagttattcaatcaaacacgaatctaggagccgctgcaaaaggctttggcagatttaattaaggtaccaaatcatgagtcaacctcaagaaagggagattatcctgggtgagatgacttcatctggtgaagggactgagcttttccagaagcctgtggaaatgtgggaagaatgtgatgctagggagattatcaattgctggctctgaagatggagaggatctgggagcacccccagctggcagccagaaagagggcagaggcttcagccctgcagctgcaagaacctgaactctgccagtggtgtgagcttccaggaggatccccagcttcggatgagactgcagcccagccaacacctcgatttctgccccgtgatgccctgagcagagaatccagcaaggtcatcccagacttctgacctgtagacctgtgagctaagaactgtgtgttgtttcaagtcactaagttggtgataatttgttactttgcaataggaaaccagcagtacactatctgctagacatacattgccttggtttctccccttccaagtcggccttgactaaccatcacccatgacagctctcatattcccatgcacaatcaattattattcctttgcattactacagtgaaagccattttggatctcttttaatgtttcttacaaattttttctttgatattttgttttttcttcattttcataataccttgtttcctgggactataaactctcgtacctgacctgattacctatctcatcaattaatcatcagttttcttagtgacaataaaattattgatagtctttattatgacccctgagacattacaaaagcttaaaggttacatttttaatgtgtgagattagctttgtgagctctactgtactttgattattcgagaactggtcatctcagtatgatatatatagaaaactttcctaaactgaatcagagtaagatgttaggtggactatatgcgattataatttcttgcaggagaatgtcctagaagcctttagacaagctcaagggtaacactatgtgggattttgaggaagacaacgacataagaaaagacaaatgtttctgaaaacatttttatttttttttctgcaagagaggtgaggacttggtgtcccatttacagtcagtgaagttggttgcaggagagagggtttagcttaagtacatccagcagccactgatggatgtcacattgctgctctggtctccttagcaccacgttcttcccagctctgtggcttgtgtccaagcagtccaggagataatccctgaaatttggaacttgtgcttattttggagctatgcagacagcaaaaaccttgagtcctcccatgtagtaatacatggaatctgagtttgggtgataagattggcgaaggagttcaatggtggggaaatggaaaggctaccaaataatcactctcctacccaaatgaatgggattactaataagtcgtaagtgcttgccccaacagaaaaaaaaaatcaccttacaccctgacagtgtcgacaacgtattacttgatgcaaatatgcataaacacatcgcaaagtatagaagtagtaatgctatggtttagaagttagatttgtggggtgtattgaaaggactacaagaagtaagaaaaacggagttttaggaagtgtcacaaaaagtaaaaataagccctggatcaaagacatatgtctcacaatcctgcttataatacacagagagcaaattggaagacagatacataaatgaatgaatgaatgagtgaataaataaatatgtgtgaaaaatatatataggaaaaatatttttaaaaaagaaagaatactttataaacttaaaaacaaacttcaaaggaaactaggacaatataataaagcaatattctttattattattctttatttaatattccatagcatgcaattttatattttatacacatttagaatgactttcatagaaatttggcatttgaccacatactaagagctgggaggacagcagccaggttgtggcccagcctctctatttcttatagaaaggtctagggattctctggcaacgccctgaggctcaggccccatagctcctcggaagctgggcattgccactcaggctggtggcagcgctggtggcagcgctggtggtggtcaggccttccttggggctgcccgtgatcaggcccacagtgctggtgtgagaaaggaaacaaaattagagctaccgtgcagccccctccaggagccaaccttgtttcatctcagtcttgcaggctgggctttgtttccagtagtcatgaggtccccgagcaggaggaccaggacagctctggcaggaagcccattcagtgggactcaccagacaccaagacggctgtctgtgtctgtctctctctgtcacatacactcacacatgcactgattatatcataagcatttttcactgattatatcataagcatttttcctgttatttaaaaacttttattgagcaattttttttcttttttttttttttaattttagagacagggtcttgatctgttacccaggctggagtgcagtggcacaatcacagctcactgcagcctcaaactcctgggcttaagtgatcctcccacctcagcatcccaagtagctgggactacagcacaagccaccataccctgctaatgtttttaaaaaaattttgtagagagggggttaggggttcttgctttgtggtccaagctggtcttgaattatgggacatatgtctttgatccagggcttattttgtcttatttcttgtagtcctttcaataaatctttgtccacaccaagatgctctaagcacacagaaaaatcagtgaggtattagttgatgagatgattgtctagcaacaataaccagtggaaaaatgaatcaccgatagttaatggctaatcctaaagtaaggacacacccatccccccacaaaaaatatgaaagggagtaacaagtgcagatatcagaatcaagcttgccccgaagtaggcaatattaaaagcataaaaagtgtctcattcctgggtctcttatgctgtgctctcccagctcagggctctttctaggatatcgcctgctacctgccttcctgggatcattgtaaagactaaattagatcatacatgtgagaacatgctgacatggaaattcctgtgcaatgtcaagaattcttgccagcctttcagaaaatggatcaaatccaattcactttaactttctggtcctaaaaataaatatcacacagagcatctcattgatccagtgggtgggggaagaaaaaaaaagcaaagcccgtctttgattcacttccaagatagtgttgttgttgttgttgttttatcaacaaatggaaaataaggcaaacaggtattgatttgtttatttatatataggtagttagtgcttttcaaaataacttttacctgattataaaggactacttgtccattgtaaaaattttgaaaaatacagaaatgaataaggaacataatgtcactacccagagataaccaattaatggcttggcctagttagttccgtctagattttttctgcatatgaataagagttgagaatacactgtatatagggttttatattctgatttttcactgattatatcataagcatttttcctgttatttaagaaacttttgttgagttttttttgttttgttttgtttttaattttagagacagagtcttgccctgttgaccaggctggagtgcagtaacacaatcacagctcactgcagtctcagactcctgggctcaagtgatcctcccacctcagcctcccaagtaggtgggactacagccatgagccaccataccttgctaattaaaaaaaaaaaaaattgtagagaaggtgttgggggttcttgctttgttgctcaggctcgtctcaaactcctggcctcaggcaatccttttgcctcagcctcccaaagcactggaattacaggtgtgagcctccacgcctggcctgaacatggtttttttttttggttggtgttgttttcgtttgtttgtttgagacaaagtctcgctctgttgcccaggctagtgtgcagtggcgccatctcggctcactgcagcctccacctcccaggttcaagtgattctcctgcctcagcctcccgagtagctggcactacaagtgcatgccaccatgcccggctaattttttgtatttttagtagagacggggttttaccatgttagccaggatggtctcgatctcctgacctcgtgatccacccacctccgccttctaaagtgctgggattacaggcatgagctgaacacactttttagtggctgaataatattccatggtatttgacattattttgggttgttcgcttagaacagatttctaaaaaatgcttttgttaaataagaggctatgactcttttaagacttttcatacatcatgattagaacattgcaagccagaactattaggggacgactctagtgtaaaaacactcagaaacatagatgcagactaattggctcctcctagctccaccattgtatatttttatttccaaatcctgtttctaatactctggaagaaaaatctgttctcttttgtgggatacgtaagttaattcttggacggcagcacagcgatcgtttacaggttgttcagtttgaatagctattaatgctcgtgcaaaataaaccaaagagccacagaaacacatttttgctggtgaaaattgtgttcgccaacatcatttctcactccagcttatgatgtcaggcatcatatttctccattattaatgtactatgccagtggggggaggtcctcttggaaggagattaaaaagacaccaccacctcaaatcccccttcctaataatgtgagaatgtccggaagcctggggggttggtgcagtagctcacagtgtcagacaacaccctgtggaggattagcttcctttccattaaccatctccactgtagagagtcaggggtcacttgtactcaccagagaaaacctgacttaggcaaagtcactattcatctgttcagcaccacatacctataaagcctcagaaaccgctattcagtgactgaatacatttctcaccttcccatcactttccccttacttggccattttcctaaacccataattcaaactttcccaaagaaaaaaaataatctctaggtaatgctcttaagaattcttagaaagaaatctttattctttgagcactcttctgggaaacctaacctgtgattactgttaggactcaaaatgtttcaccacctgcatctacgtagataggatgaggagtctggggaaataatggagccaataggcttttagcttgaggagcgtggattctaaagccagggacactcatgaaaacaaccacctggcggattacaccctaacgttgaaactgtggcaaagtaccttttaattgcaaaagggtttaggcagagatttatctttgagttccttggcaataaatgtttacccactttaccactgttactatagaatggggaaggtttaaggtagaaaatttaagaaaaataatgggaagatgcctaaatgaggagggaggggttggtccttctctgaatatttaaaaaatccacaacatgtttacattccgagggtggtaagtggggagggtgaggtctggggagggaccttccccagatgggagccccgtctgtatgtgagcagagagaaaaagaccctgcatagaacggtggtgccctttggacccattcatagcctccttgtgaactggagctttctttttccagagcagggacccagacagacagaggggtcaactctctgacccctcctctagcttttatgaattaaattcctcagacgtaattcccagctctcatccagcggctggaacacagggagtgaatgagagccaaacaggtgccttcattctcacctttgccgggctgctgtgctgtcgtgactggggatctcgacatcccgagcaatgccgtgtttgccacactggcaacagtaacagagcaatctgcagccggcttcgggatcgaaatttgcaaactcaggatcctgggcttcaggccaatgcaggctgggtgcgttgcagtggtgacacgtttagtctctagggagggatgctggcacaccagctgcattcctggcagcacgcttgccagtgcgaaacttaacgagtggagctggtatcaactccagagggagactcaagctgcttccttaacttctttggcaatactcccctctgcaacttgtgcgcagtacaccctcctgaatatttacaggagctgctatttgcgatactatttggggccctgttggatagtactttgaagggaagtgctaaaacgatagcagccttccagtttacaaatgtaactatagtattcctgaataattcaatttcctaaaattggcacttaactgtgcaatgacttatttcttgctgggaagggattctaatcccaccccccaccccccactcaccaccccacacatacttttaaaaatagcttctacttttgccaagaggagcgcctagtatttactattggaggatatgtgaattaaaataccagcttctttccctgttgcaatccaccggcactatattagctgagttctctgctacctgagaggaacgtatcctcaacagaaatgccttagtttttcagaatgcctcacccacctctcttatttgtgcttggaaggcaacgtgagctagaatttggccacttagtattcagaccatgtcaggattcaagtaaaaagcctatattgcagagctggatgcaccgtcgccaggccaaacacagtcaacagttcaaatcacagttaaattataagaaagcgtggggcgaaacatgcaaacctgccttgtcaatgaagcagtagagataaaaggaattactccataaatgctagcttgtggggctttaatgaatacagagatggtgttctttccagctacatcccattgattataaaggctagttaggattttaaacataatgctttcttcttcctcctcctcctcctccttttcctccttgcctcccctcctcctcctctttctcctcctcctccttcacttttgtcttcttttaacatgcaaagcatttcccaaagtatggagaaatgaacaatacctctgtgtatttccacagttttgcaaagggacggtggtgttagcaggccaagtatctactactggaagcatcatatgtagcagaggaaatgcagttaatacaataattcacatatgttaatgcttagttccatcaatgtcagctttattttcttcttgatatacacaaagctggcacacagttttaactgatgaggtaatgtcatttttaatttagagagccttaagctgtccacttttactagtgatagcatcgttgcagttgtctcctgagactttatgtaaacataagtcatgcgtcccgggcagtttgagaagagattgttaaagatgacattgggcatcatgaagatttcccccactttgatctcttttaaattgccagatacagtttatgttactgccatattttagccattcctgaaattaatatatcccaggacttttgaaccaagttaagtacagaaataaaacaaaggttggaaatgaatgccttgtaatgttttcatgtcatttcaagaagaaaaatggaagatgaatcagattctcttgctcctaggtgacttggtaaataaaaagagaagaaagagcaagctcctaagaaatacataacaccaaatagacaaaagctttcttattttcctaggggacactagtgtattggtgatggctttgtacattttaaagataaataagatccaactatctcttatctttgtgttaactttttagtaatattttattgtcactttccttacgatttgtatccttagtgtcattattaagcctgaattttaaatctcatcacttttgtggtatcaagcgtttctttctcaaacaacgagatttctttaaagactcaaacaatgatattcctttaaatattcagactagtgggtataaacaaagttattttccatttttaactaaactttttcttgggagaaattatgctctagaatccaagtgtcatttgggggaagataatctgtgttttaactattggatgtggctactgagagactattttcaaagaagtctggagtttggtggaatgcagttaaatagtaaagaatctgtttattattctgtggccatatgtttagagggtcgctcacagaaatcaaagtattgttcatagagagctccagccaaggagacattttgaattcataaaagaacttcacagtttgaaaagaatgcatagcattatgtattgacaccccaccaccatagacaaaggaacacaatttaataatagaggattgtgctcatgagatttttctttttctttttaattggttactttaactgacattgtctgcaagtataatggacaccattattcttaatagttgtgtgttgccagatgtatacagacatgatgtagtccattttaattatttcattttgctagacttttttttccctccatttaatgcagtgatgaatgcagatagaacttttttttcttcctggcacactatgctggatgatgctggtgtctaaattattgaaattaaaagggcatttctcaccaacctaatgttttcttccatgtttgtgtattaggtatgactacgtggaagtcttcgatggagaaaatgaaaatggacattttaggggaaagttctgtggaaagatagcccctcctcctgttgtgtcttcagggccatttctttttatcaaatttgtctctgactacgaaacacatggtgcaggattttccatacgttatgaaattttcaagagaggtgagtgaacagcttacggtagaacaagaatgactaagagttcatttaggccgagtgtggtggctcacccctgtaatctcagcactttgggaggccgaggcaggtggatcacttgagctcaggaattcaagaccagcctggccaacatggtgaaacccagtctccactaaaaatacaaaaattagccaggcatgatggcatatgccagtaatcccagctactcaggaggctaaggcgggagaatcacttgaacctgggaggtggaggttgcagtgagccgagcacaggccattgcactctggcctgggcaacagagcgagactctgtctcaaaaaaaaaaaaaaaatttatttaacattgtttgatttcacgaaagacaaagtgaaaaggaagtcagaagtaatgcttttatccttttgtaaaacatatatcctcattataaaaatgtagggaagtactttaaataaaggtaaattacccattgtatggaggaagtgtatttaaaattgaaaaaaaaaatgtatttcagcaatcaaaattgtacccatctgaagtgttggccagtgttataaggcagcagtctccaacctttttggcatcagggaccagcttcatggaagaaaatttttctactgacagggtttgggggatggtttcagaataattcaagtgcattacatttattgtgcactttattcctatcatcattactttgtaatatataatgaaataattatacaactcaccataaggtagaatcagtgggagcccttagcttgtttttctgcaaccagacggtcccatatacaggtgatgggagacagtgacagatcctcaggcattagattctcgtataaggagtgcgcaacctggatttcttgcacacacagttcacaatagggtttgcgctcctatgagaatctagtgctgctgctgatctgacaggaggaggagttcaggtggtagtgccagtgatggggagtggctgtaaatacagacaacactttgctcgcctgccactcgcctcctgctgtgtggctaagttcctaacagaccacaaactggtaccagtctgcagtccgagggttggggacctcagttataaggtatacactccattagctttttaaaaagcatttattcttatctgtcttcttcaaaaataagtttgatctatccttgaagtctgatttctttcattaaaaatgcattagccagccatggtggcgcatgcatgtgatcagttccagctacttaggaggttgaggtgggagggctgcctgagcccaggagttggaggctgcagttgagccttgatcgtgccgctgcactccagtctgggtgacagagcaagaccctgtctctaaatataaatgtaaaaataatttaaaagtaataaacaaattaacaaacatgtaactttatctggttgccactgtttttagcaactgcctataaattccttttgtgtgtgaaattcagccttcctattatttacatttttaagttggcattaatgtatagaaaaccaatccagggaaagaggatcaagatttgaatgtattgtcttggaatacagaagaaaaagcttgtttcgatagaaaaaaaactaactacatcaatttcaaaagccttcggtcttctgggttcatgataactgagaaaaatgtaaaggggagttgttggggatccaggaaacgttgcgacaacttctttacatttcaaagatatttggctctgacaccacataaatagggaatagatggagagaactttcagaaattcatctaagcacataagtacttagaacacctttcgtatagataatagtatacatatgatatcagcataaacagaggatggatgtacatatttttagtgatgaaaactgtttgacttgttatagaagtcatattatacgtgtctgtatatgtacacacacatatgtacacctgcttgcttacctgtatgtggcactatcaaagacaaaggtgtcagaaaaggggctaggaatagccttttattttcagttttcttagagatctgaagacagttgaaggagaaaagagagatttgtcactaactcatgaagaattctttgtgttccttccaaaggaactcagctccctacgtatctgttagtctcagatgtagcaaagcttcctatcctgctctccaagcccattcttcagacttgaagtcttcttttgttctttgtcttcttgacttcccacatccaatacggcatccactgctttttaattttcatccaaaggtctcaaagactctcagcttcttttccatgtcactgccattaaccaaataggcccagttgtggccctcccatgtgactctatcctgctcacagcttctcaaacaggcaggaagccactgtcctcaaaatgtccacactgggtctctgtcaccccactgggcaagattgaggtcctgctcaaaacagcatcaactgcataaaaatcattaatataattcatttatgaaaacatatatatatgtatacacacacacacaaaagcacaggtcatgaatgtttttccctcaaaagccctttaatgatattatagaattcatggatcattattcttttgaagatacagtacttctttcaggatgcagcaatttcaagtttcctgaaaacacataaattacactaatcatagtttaatgcaaccagaatggccttgaggtttccggtgtgaggtcacagttctaagagacatttaggccattccagagtccccgggttgcattgctccagggtcatctttgcctgacagtcaacaaggccagccccgcttcttcctgccttcctggagccatgttggaccgccctaattctcctcctaagagcccctcttttccttctacatgtctcttcccagatgctgaaactttgggccaccagccctacatttatttccaatcgcctaaagagatttctctaggaaactcaagcctccccactgatctctgttcccatccttcccttggtcttcaggcccagatgctggaagaagctgctgctgtttcctatgggtctcagtgcaagggggacgggggacgggggtgggtgccatttactgagggcagacttggtcacttgatatatgttatgtgattgagagtttgtgcatttaataataattccaaagagagtatcttgactgttattattctctgtccttattgtccttggcaactaaatggtggcattccttatagctatacaagttactcctgttcttacaagtaaagaggagagctcatgttcactaactccaaatgcctgtgtgagtgccacttactcctaggcacccagggctgttggcctcactcctgctcatctcctgtgttgtattctcatctcctgtgttctcaaactgctgtaaagaaatacctgagactgggtaatttataaaggaaagaggtttaattggctcacagttctgcaagctgtataggaagctgatgttcacacctgctcagcttctgggtaggcctcaggaaactgacaatcatggcagaaggcaaaggggaagcacatgtcacaatggccggagcaggagcaagagagaggggaggggaggtgctacacgtttttttgttttttgtgttttgttttgagacagagtctcactctgttgctcaggctggagtgcagtggcacgatcttggctcactgcaatctccgcctcccgggttcacgccattctcctgcctcagcctcccaagtagctgggactacaggcgcccgccactatgcccggctaattttttgtatttttagtagagacggggtttcaccgtgttagccaggatggtacacgtttttaaacaaccagttctcatgagaactcacttactattgcaaggacaaggccaagaggggatagtgctaaactattcatgagaaatccacccccatgattcaatcacctcccaccagaccccacctccaccattggggattacaattcgacatgagatttggtggggacacagatccaaacactatcacgtgtattcaccatggactttcttaaccccttttctgccattgtccttttgcgagaaagtgcttcttcaactatggtaaactgaaacaacagtgaataaggaaaatattaaaacaaattttggtgtatagtggacaaaatatgaagttacagaatctttaaattggaagagattttagttttcaaattctaaagtccaactcacatttgtcatgcgcagaatttgagaaccagaaatgttgagaggccacccaagtttacacagcgggtgagtgaatctcaggactgggattcaggtctcctggggctccatccagttcttgtccatcgccccatggaatgtccccatgttttgtcgaaatacacaagaaaacctgggatcacttccatagcatgacaagggcaaagtgaaagcaccaaaattcacttgcttttgaaagtatgaccttaattcctgtcatttttttctcaataaatcttaatctgaactgaaacattttatctttttaagaaggagaaaatattagtatctgcatgaaaccttgctgtttcatgcagatactaataaaccatggcttacaagaatgtagccaaagcggttttttccccagggaagagtttggaggtctccagggtaactgtttctacactgtggatataaaatcctaaagggtccccaatatcatgtatgtatatatatattttttctttgtggataaatgactcaaattagcatagtcgctgtcatctcagaagccaccagagtaatttagaaactaagattataaaccatacagcacatgtcataatctctacctggaactgacctggcgaattgccacgttaccaacttttgaaccagaatcaaatagataagcatttgcagctctcatggtgaagggtgagccacgtccaagaaggtttgagaggtatttcaaataagtcagacctctgcagaccaggtttactgggcccatctaagaattcttctgcatctgcaatgccatggatccatggatagccgatatgtgcatgaggaggaaaggattgatttgttttctcaacaggctgccagatgcactctgttggtattcagcctcctgacctgaatcactaaaactagagacctgctagttagttaactttaatctctattgatgtctaataagtcgcctctagttgcctggcactttgggagaatgtttagttaagaacaatctcaacaaagcaccttatttagaattgaatccttgcatgtcattgccggggccccatcacgtctgccttcaagccactgtgagaaaatgatgcaggaaaagagttgttgaactgaacacccccagatttgatcctgaaattcaaaaggataaagacttctctgattcacaagtgtcttaagtgtagctatttgaagatcatagcagcaggtggtattcagggactgagctgatgtgctcatgttggtagagaaggcagttttgggtttttttggttgttgtttgtttgtttgtttgtttgttttttgaggcggagtctggctggctctgtcacccaggctggagtgcagtggtgtgatctcggctcactgcaacctctgcctcccgggttcaagcaattctcctgtctcagcctcttgggtagctgggattacaggtgcccacgaccacgcccagctaatttttctatttttagtagagactggggtttccctatgttggccaggctggtctcgaactcctgacctcaggtgatccgcccacctcagcctcccaaagtgctggcattacaggcatgagccattgtgcacacccggccaagaagggcagtttttgaattgtgtagtgaataccaccctatgctggttaccatgaattgaaattggagtcattcatacaggcataaggtcaacctgcactatatgcatggatgctcttgaccaatttcaatgacaaatcaccataatttgtaaagtcctggtggtactgaacagtcattaaaattacacattataaatatatgcattacacacacacacacatctattaacatgcaattttagaatggcgtactatactgtgtctgatacttcggggaaggttaggatgtcagcattgatatcaggtgacttccggcatcatggcctgtaatcacagtttatcgtgccctcactaacagccacactttaccggcccacctgtgtcaacaccactcagaatgagtcactcacccttggtacatgtacgaattacctttcacatttcgtttgtcaaagaggcataggtcacatctggcagagttactgagtcactggtgtaggaatctgaaacccaaactgcctccactgaattctctccctcgcctttataaatgttctatttcaccaataaagggctgtcagcctcaagatttaaaggtttaagcttgaaggggccataattatttctctagggctctgttgagatttctgcagcttactcattcattgttcccacatgattttatatttgtcatatttttccctgcaacagcagaagtctttaaattgctccatacaaatggaaagctaaggttaacacaataaatctgaacttgactttccatacccattttactaatatgaaaaggctgactaatacatgattagaacagtggttatactggcgggcttttattagaaagatgttctgtctttacccaggttatttcttggggaagttgtttaagtgggattttcactttactcctttttctcttctactcataggtcctgaatgttcccagaactacacaacacctagtggagtgataaagtcccccggattccctgaaaaatatcccaacagccttgaatgcacttatattgtctttgtgccaaagatgtcagagattatcctggaatttgaaagctttgacctggagcctgactcaaatcctccaggggggatgttctgtcgctacgaccggctagaaatctgggatggattccctgatggtaagaatgacaggaagcaccccaaaaagggaaggttctggaggaagggcaccagtattcttttacaagtctcatgatacatgaatcattaaaaaaaacctcaaaaggacactggaaaacaaagcaaaactctctatattcagagcagtgatgaaatatttgagctcaagaagaccttagtaattatctagtccaattccttcattttatagataagaagctgaggccatgaaagattacaaaaggttcttttagctatttttgtgatataattgagacaaacacatagtttttctctctaaactattttgctcatccactgacctggctactcatcattaattcacagattgtaagaggatgggctcttagtaattccattacatcaaaccactcattttataaatgcagagaccaaggacctgagaggttgagtacttaataaaattttaaggctaaactatgcatccgttatgctacaaaacaaaaatttggaaaaggaacgagaatgtttgggcattcctaatttagacaggttccctgtacattctctacagatttttcatcttagggaatttgagtcacctcaatacatcatttatagtcattgacctatgcattcatatacctaaaaaatatttcctgagcatctgtcatgtaccaggcaccatcctagccacagggtaagcaaaacaatgaaagatgctgccctttggagtttctcttctgccaggtagaaggaaacaataaacaatgcacgttacaaataaatgaattatgtgcatgaaatgttagaaggtgagaagtgctataaacaaatctccccaaatgaaagcaagaaaaagtacagcagagtcaagggatgagaagttgggagtggggaggtataggttgaaattttaaatagggtggtgaggttagactttttttttttttttttttgagacagagttttgctcttgtcacccaggctggagttcagtggagcaatctcggctcactgcaacctccgcctcccaggttcaagcaattcttctgcctcagcctcccgagtagctgggattacaggtgcacaccaccacactcagctaatttttgcatttttggtagagacgggttttcaccatgttggccaggctggtctcgaactcctgacctcaagagatcctcctgcctcagcctcccaaagtgctgagattacaggcatgagcctccatgcctggccgaggttagaccttattaaagaaaatgacatttgagcgaagatttgaaggaggtggaggaaatagccatatggacatctaaatgaaagttttccattccactcttgtgaattagaaggtaaatggcaaaaatacacagtgaaattctgaacagagggggataatatccaataatttgttaacagctgcattgcttgtcttgtgtttagtctggtttaatattaagatttctctagagaacacacactacacagatcagagaggatggcttggaagttcttcaccatcatggagttaggagatgtataactatctgtaaaacagagtcagatactattctcaaaagaatatttaaatacattgtacatgaagaataagtaaaatgtagaccgggtgctgtggctcctacctgtaatcccaacactttgggaggccaaggcaggtggatcacctgaggtcatgagttcgagaccagactggccaacagagtgaaaccctgtctctacgaaaaatacaaaaattagctgggcatggtggtgcaggcctataattcagctactcaggaggctgagacaggagaatcacttgaacctgggaggcagaggttgcagtgagccgagatcatggccactgcactccagcctggggaacagagcaagaatctgttttaaaaaaaagaataagtaaaatgtaaaggagattgccttagtctttgaaatgacattattattagtgtgattcaatttagctatgttcctcagtagtaaacagcattagaaaaaaaccaggtttagagaagccttatattgccattggaataaatgggtgagttaacattagtttaatatcttctttgctcttttaccatataaacagggttatgataatcttatcaaaactcctttattaaataatgagatttgcccagagttctgattgatttccaagtattcaatctgataattaggaaaatagtattataataatattgtaacaatagttggaacattttacaatggatttatttgttcacaacccaaatttgcagctttcctttctagaactttcatttaaattgacatctgaagaagaggtccaatcaatcaacttatttagaagactttcagaaagaaggcacattgttattagtgtcaagggtttttcaaagtagtaattttctggctctagaaaatcactgagttgaatcgaggaacaattaacaataagagttatcagccttgcaatttacgcatgttttaaactatggtgcctttcacttgttcccagagaaaactggctttggaatatgaagatgtgtttgtatatttgttaatatttacctggcctcattcagcctgcacctgcataacagctttcttttttaggcaaaataaaactgcatcttcctggattttttttttttttttttttttttttggtcaatggcactagaaacatttgtgtcatagtagttcaacatacacagttcctctgccaacaagattgcttttagtctttgatatcctttccaaaaacaacaaccagaaggcgtggaaggcttttaaccatcaagtgattttatgttgcattttatcataaacactgaattaaatgactaggtaattgaaagctacccattgattcaaattgactttgaagaaaagcagtttactccagaactcaaaattcaaggcatgcgtgttgtgaatcacacatctccatctatcactgtgtttgaagctgtatggattcacaagtagcaactctgaaaaaattggtggaggtttacatatgggctaagaccaaaagtgcagcatcattgcccgggtacatgctggaagtgttggtgctggatgatggggcctgaagtgaatgcttagctcacgtcacatcggtgctgatgatgtcagctctctgcctcagctggcaaaaggggctggaactgcaattttaccaacattccaaaaattatcaaccatttcaggaatacatttcataaaagctagattgagttctgcttgttttttatttacttttacatttaattaatcttctaaagattaatttagaagagatagatataaaatgccagattttttctggggaaaagctacaaaatgtatttttggtattccagatattctacaccaaaaagtgtattaatttcagaaaaatatagatggcctattttgtacgtttgaaatgaatccctttttcgtttattattcaaaatacttcattttaaaaaggatacctttaggccaggtgtggtggcttactcctgtaatcccatcactttgggaggcctaggtgggagggactgcttgaggccaggagttcaagaccatcttgggcaacatcgagagatgagaccctgtctctacaaaaaaaaatttaaaaattagctggtggtagtggcatgagcctagagtcccagcccttcaggagactgaagtgggaggatcacttgggcccaagagttctaggttacagtgagccatgattgcgccaccgcactgcagcctgggcaacagagtgagacacccatctctaaaaaagaaaaaaaaaaatttaagtacctctttatagtagatcagcacttttattttttcacataaaaagtggcaaaaagccaaatcatctgattctgagataaggttacaattattggagagattaatgggaaaatgcaaaggatgtgggatcaccattgcccgttgtaggcatatctttaaacagcacaaatactatattcctttcacatctgatacgatatgatcattatagctctcctctccctgaagcttggcacatgttgcttgctgaaattctgcaataattcaatttttgaattatacttctgtttttgtgaccattttcattcatctcctcggcgcttcggtccacaataacagaaataggaaatccaatagctgtgttcatgtaaatacacaaatgagcacacacacgagacggataagagtacttcatccactctcgctcagatcaatattgcattagcttgctaggctaaggtctcgctgttgttcaggaaaattcaatacttctttgtattatagtcgaaaaagcctttcactctcgtatcttgagggctcctaaagagagtggcacgctgttgtccgggggcagtgttctagggacagaaggcagatttacccagcatgtcttaaacattataaaccagtgagtcatggagactctctaaattgcaagtctgcatcagacaagttctcttctgttttctctttcaaagagattccccttccgccctccccaaaggaattgggtgatagtggcagggaggatcagccgcctgagcttccacagggcaatcacagctttgcttgcaagcttgtattctgggggaggtcagcggctgtggcgatcagaggacgaccccaaggattagggctgtaaacatttgcccacaaactaaagaaaaaacatcatgaagccacactaatgtaatttaaatgagggaaaaaatagtgaggaagtctgagtggactctaaggcttttcttttaatattgcagatcagaaatgagattcctttttaggaaagcaaagacttaagtgtatggttctagcaaggtattttcatgtgtatgttatggacaacttcgtgctccagagataagaaaaaaaaagtgttgcattactactagggccacatccagaatgaagaaaatctattaaatagcaaagaaccactacctgtagaagaatcagaagccaggaataaagctgaagagagacaaaaaacagcaagagtttcatcttctgagatgctttcttctgccaactgagaagtcgaatataacaaaatttgcttccataatgcaaagctattgtccgtgacagcgtgatgccctgtagataatctgtatcagtcctcctcactgggtcatcctcctcattttcttcatgataaagcagtctatgcacacaaactgtgtggtgcctggagggagagtgaggggttgcaacagagagaaaactctgaattcagtcaactccattattttcaacacatcgaaaaattatcaggtattattcaaagcaacccattgttgcgctaactcaaataggtgaaccattttggtttactttagttattttattttgtttgggtttggggttttttcttttttcttttttaaagagaattggccaagagctgaaaacctgtcggccaaggatctgtgcaatccacgaaacagtggctccgatttgctgcctactaggaacacagctggtacttgggcttcagggagaccagttcttgtggggttcactttggcaaccacacttgaagtctctcctggccttcatcagccgcatcctgcatccaaactgcacacactggccttgaaacaccacgtccctgttaaaggcccctccctccagggacatgtctacctaatgtgcttctttaaacaaagcaatcattcttagttgaaacgcacagaaccatggatttcttggaggggaaaacagtccacaccatattgtccttctaaacccaaaccatctggtatgtttttgccatatgtgcaatgaaaaaacctagagaaaaaaaaaagggacttttttatgtgtggcttgtcgatgatcaggacagggaaatggagagatttgccatccacgggggttctgcactcttcccaaggcaatttccagtttactcattgccagggtttgcttaaagcacttcaacaaaggtgtggccagtttaagtcaaacagcaaattgttgttttttttgtgtgtttttctgagacagagtctcgctccgtcatccaggctggagtgcagtggtgcaatcctggctcactgcaacctccacctcctgggtcttgcctcagcctccccagtagctgggattacaggcactgcccaccacgcctggctaatctttgtagttttagtagaaacggggtttcaccatgttggccaggctggtctcaaactcctgacctcaagtgatccacccacctcagcttcccaaagtgctgggattacaagagtgagccaccgcactcagccatcaaataatttgactttaacataaattagtgggtgttcccaatcattcgcctcctcaagtccactttttttcctggtgtgcacaatcaaatggttgcttttggtgatgtcttggccactggaaacaagtcacctctcagatttaggagagaagaaactaggacagaagtcagacagatgcatttttatttcatttagattataagttgccattatgtataaattattggtatatgtagtctccaactttttacatggttacaatgatttgtcttcacataaagccctgagtaggacataatccattgtcctttgtccaagcctgttatgtttatcataataagaatccagggctaaaagatagcatgaggaagccaattgcaggtcaatcgtggatcagacccctgggactgatcagaccagagggttccctggacatcagcatccccagaatctccccctagggcaagagaggcgaggacgggtaactcagaaacctcagtgaccacagcttagcaggaatcttttggcgctgagctgtgtatacagatttgccctgccagtgggtaccaaggtgccacttcaatagcctaaatctcattctttgcaattgaagcaagcattttgattctgttcctgaaaacaattctgctcactggggaatgcggttatgcctgttactgcccttctgagtacactttaaaatcttctccgcaaacccaatccaatatgttcacagcaaaccaattaacttagggaagccttgctttgggttagaaaacacttctgggttctactggggcccatctttgtaaatgctaattcttgcatctgctgcaggagaaaagacattttgacatcgtctgtattcctccctttccagttggccctcacattgggcgttactgtggacagaaaacaccaggtcgaatccgatcctcatcgggcattctctccatggttttttacaccgacagcgcgatagcaaaagaaggtttctcagcaaactacagtgtcttgcagagcagtgtctcagaaggtcagtgtttattcattttgcaaagccctgtggtaaatactcaatgttattcctgctcacacacctgcggccacatgaagcactaaagaaatgttttgtgaactggggtgccagctgtctgtttttctcttctaaatgtttttttatgagtatcaataggaagaactgtttggtgtgctttcttcataaaattgtgggtgagaagcctgcttgggagcctctgaaattatgggagaaagtaggaaatggcaaaatagtgccttgaaacaatgaaatgtgactagagcatctacctggcaccctcaaatgcatacaaggctgagcatcataagaggacaggcatctatcccagatgataagaacaaatctaaagtagttcaccgacagagcagtcacgaagtatgggaaatgcacagtggtttggttgtggaagatgctgggggaagccagtatgttttttgtattctatgaaaaaactcagctaactcaacccttcctcaaagtttttgtggtctctagctcttttaaaggcccaagaaaaaaaatctgaaagaacaaagaataaggccaggactggtggctcactctgtaatcccagtgctttgggagggcgaggcaggaggattgcttgaggccaggagttggagcccagccttggcaatataatgcgaacctgactctactaaaaattgaaaagttagctgggcatgggggattgtgcctgtagtcccagttacttgggaagctatgggaagattgcttgagcctcaaagtttaaggctgcagtgagctataatcatgccactgcactccagcctggttgacagagtgagacccagtctcaagaacaacaacaaaaaagaacaaagaaaaaattgtttgtgcaattatcagctctagctgccaggctgtaaagtagcacagggagaggacagggggtgtttggagaggtattctacagatatgctcatatcttctacaccagatctcactggaaaataaagaggccagtgaaatttcaaaatctgatttgtattttatttaattgatttatgtatttttgtgcctgtaaataattgttatattacaaataacaaacctaagcttaaaaatatgaagccattgcaagaaaaccttgtatgccctaaaaccttatctgttattgatagaaaattcagaaaatggggaattttggttagttgagattttctggatggttgagaatcttccctttaatctctaaagctttttttcacttgtgtactttggataaacattttcctaaaactgaaagctcatattcccagtatcatcaaactgaggatgttaggcctaagagaatatagattttgatgtttcactggccttgaaacaccacgtccctgctgaaggcccctccctccagggacatgtccacctaatgtgcttctttaaacaaagcaatcattcttatgctcactgttgtgagcattatgattttatgctctaaaactgtggtgctttggggccgtgtgacagtgcagtttacccccaatgcataactgtgttttgataaactaattatgttaatagtcatgcaggccagaggtggggcataagaacaatggaagtcaggaagaggtggtctgggtgccaatagtagaatctgaaagacagggagttaagttctaccatccattgagtatgaattgtaactagacatagagtcttttttcaattctcttcgatattaaaagaaataatttaatacaaaaattttattttaaatgcaactttttgtgtgtacccatatgacaggtagagtcacagatagttacaaacacacacactcaactgtgaaaataaatcagaattttcatcatttcctggtaaatttcaaatagtctttttgtcaacctaggtccacttgggaaaattattaatcactgtatgatcttcataatatttttaaatattgccatgaaaatccaagtatcagtgctatattccaataagtcccttactaccatctttttaaagaattttgaatgaaagaactctttggtgtatcaagttaaaaaagaaaaatgcatcttaaatcccctatattttgatgactgtgggccctgtttttcccttcagatttcaaatgtatggaagctctgggcatggaatcaggagaaattcattctgaccagatcacagcttcttcccagtatagcaccaactggtctgcagagcgctcccgcctgaactaccctgagaatgggtggactcccggagaggattcctaccgagagtggatacaggtatgcagcataagatcaagcctatctaggattgaataagtttttgaccatctagagaggttgttgaaagaaagtggtactgtgccaaatggcctccaatgagaagataggttcacggccatcaggtataaatcactgcaagagaagataggttcacggccatcaggtataaatcactgcaaaatgagcccatcgctacacgatcagagaaaagcaggcccaagatgacatccctgaaaacgcatttatcttctcagatacttatatactactcttccgagaatgtgactacaagtgtctcactttgataacagctccaagatctgatttttcccaactacacactgtctgttaatgggcttcctattttgacatgtttttatttcctggatgaaatatatgaatcctgtttatagacgtgtatgaaataattgtttccaataataggtttctgtttgttcagggtaggagaagggaaggaaaggttggagtgtgtttttccatgtaggtctatatagcacacatccaagaagggggtttggttgaaggcactctccattgacgagatatccatgtttaggcatgaaatgtacatatttgtgtcttcattagtgatgctacctctgctttcctcgctttgttctggcattcccttcctgctgtcacttacatatccccacagacacctcgtctgccccacatccccaccgctgaccccattttccagccgtctaatctaccccctctcatcgccggcaccactcctaatgcccacttgcccaaccttgatatctgggtattcccacccaaaggcctgatgctgacagtcctgagtttttcactcactgttaaatgaaacatccatagctggatctgtgggttaaactgtgggcaaattatacaaaagattatttgctgaaggatccaggcttccttttcaggagaatagtcagatcctgtcttacgtttattgctagatataaaatgactaattcccagagagagtttctaagcaagaaaaaaaaaaaaaaccacaagatgattaatcctctactttccacatctattgctgcttcagtcttttgagcacaaatagcagattttgttttactttggaaaggtcaatattagtttaacatacacttaaagtgaaatggcctattacaggagactgaactcacgctaacctccaacactgagaaatatgtagagagtgagaaaagatgagacgtctaccttgggattgctgaatccatctctagattaagacagaaatgaaatgagtttgccagtgtcaaaatagttcttggtaacttgttttcccacatccccaaaccaacaggcagttcagtatgattgacagatgtgcctctcgggggaagcttacattttgcagcactaagcatgtttgcatggtaatgaaacaggaaaggtctccttgtgtccctcacagggcgtgcgataggggtgtggctcgcttcttcagtgccccgctgctgaaacctctaggggagcatacagatgggcaggcagtggggcttcgaccccacggcagtgtctaaggctgaatgtttacagccgcagccccagtgggcgcgtgttacaggtgctcttttgctttgccgtctataggcggcttgtgttcaccagctcaattagacccccttccttatcacaaggacagagggatttctgtatcccagggtttcttgccttggtgtacgggaagattcggatcacacgtggtcttggagaatgcgtgcaaggttttattgctgggggagccggaagggagatggttttctcctggactcttctccaacagctccggtcaaactccacgtcgttgtgcttgtgcctgttggtgtgctcttctaccggtgggctctcgacgatcagccacttgtgccttcttcccccaatgtgttcctcacgatatccagccgcttgtatatctgcccgctagggtctcgggttattaaaggcccaggatgggggcgtggtgggccatggtggtcttggaaaatgcaacatttaggcgggaaagcaggagtacctgtcttcactttggtccgtgggggtggagccctagccagggactctcctttctctaccctgcacttcccttcccccttctgtaccatttaaagggaccgcgctcttgccttcccagcactcccgtatcagtaatgtagtcccattcttggtaatgtggggagctctcactaaggtagaaatggtggtcttccaggagctctgaaactgcaactgtagcaattcttctgcgcaaggcaattctcttgtcagtaaaaacactaagactacatggcctctcacaaagcatttgtgaacagaacagatttacatcattctttggagttagacacaatctgagattgccccagaagaaaaaaaaatctcaaatcatccatctctttttgccaatgagaaaacatgatcaggagaagcaaggtaactcaaaccccaaaaactagagggttttcttcttgcttatgccatgttctatggctgggccagctggggtctgctctgtatcttctcatgccaggacccagacttgggggacagcgtcctctgaaatgttgcctgccccaaggcagagtgtattagtctgttctcacaccgctataaagaactacccaagactgggttaatttataaaggaaagaggtttaattgactcagttctgcatgactggggaggaaacttagaatcatggcagaggggaagcaggaaagttaagatcatggcagaaggggaagcaggcacgtcttacatggcggcaggtgaaagaggcgagtgaaggaggaacttccaaaccatcttataaaaccatcagatctcatgagaactcacccactatcatgagaagagcacggggaaaaccgcccccatgatcaaatcacctcccaccaggcccctccctcaatgctggggattacaaatcaagatgagatttgggtggggacacaaagcctgaccatatcacagagggaggaagattgcagctcatcatgatggttcttgggtctccctgctggataacttccacccaccttcactgccaaagcatatcacagagccacacttaacttctgaggggcaacaggaagctgtggccccacctggctagagggaggagagcttaaatgataattgtcctactcatacgacactaatcctttatcaagtccaaagaatgtggcccgatctgtcctaagtacttgaatattttttatctgatcctcactgcaatcctgggaaggaggtataatcatccccattttaaaaacgagattgctgaagttcagagaaacgagtaaacactcaaggtcacagttagtgaccaggcttggaaacaaggtctatcagactctaacacccacttgtttatattacagtatgcaggattttaaccatttattcccattcatatactttcaagcctattttatgaaatgtccatcacctccctgctgaatcacgttgagatgggttgggtgcttcctatttctaagcctacaatgcagggactttgctgctccatccctctgaaaggtgaaagtcacaaaagcttagcttcaggttcaccttgaggtaaaattaccgtttttcgccttccgagctcagcaggctcatttacatgcttcttgtgtctgtgtacagggtgggtgctgttatcatccactgatcacctaattatgaataatttcatgtgtttccagcttttctgaaactccttggaagtggttggcttgttgttttcattagatagatgttttgtaaattaaccaacaagtacagcataatttatactgagggcaagaggcacgtacctctaatcacaagaaccttagcacacatacatttctatttatatgcacataagtatgcagatgacatttgttttctttttcagctttttcacattttgcatgaaatatgccctcacaaaacaagttgctgtagcaacaacaagtacacaaatacttgcatgtgttaaattaataaggcgatattggaagctgactttccatcaagacaggaacaagcttcggttcccattgttttccctaggaaattactgagtggcattaaaaaaaaaaacaatgcatcattaactgtcgatatgaacgtccacattggagcttcctgtgagatccgttgtctgccagaaagcttaaaaacaagtcaaggagcctgttagtgagaaggagcgtgaaggaagtcccaatgtgaaggtttgcacacagccatatcctgctcaaaaagccacttcatatcctgagctactaaaatttcctcattgtcagtggcagagttaatcacactatgaaatttgcctgccctgcctttttttccagattattccattctttattctgtgtcccagagctgctgatcttattattaattttacctttttcctttctttgtttctggttaatcattctaggatgcaaaatacagactccgtgtatcagtggtgcgatcaaaatcttcctcttcaagcacatcattagaacccaggccattaagctcattgaaactgagtttcttttcctataaaataaaaataacgtagccttcactccattcaggctctctcaatctgtgatctatgaatctcagagaaatgcagtttcagtttttccttttcatttccgcaaactaagtacacagtgtactgcatcttctagggagacgttctcaaagatcctgaacgtagccattgacacgcaaagcagaatttaattcgttaattatttcaatgttttattaatgatagtgttcaccacactgtaaacagatttatccttccagctttaattaaagctcttgggagtgctttcctcaaaataactgtgacttttctctgattaaaatgccaggagacaaaaaaaaaaaaaaaaaaaaaaaacaagagacataatacctgggtgggatatgaactttgttgttcaaagaaacaaaaatagcaccaggattaccacactccctagtgacttttgaaattaaattacttgacaaaccaactcgggctgaaactactcttctccaaatttggggactttttctcttgtggaaaaaaattgtggtactagagtatttatgccttcacttattctggaggagcagagaatggttgacttctaaaccacatcctgtttgggttggtaaatcagccctcttgtggattagtcacacagaaggaaacctaaaggaagacagtctgtacctataagaccacatcagcaaacccttgaggcaagagcctcttctttctccactccattttctagtgcagatattaattctcaggtatgagaagaaggaaagttccagaagagaaggactggagccaacctgctgaagaagcttgttttcatgttttccttttgccttatatgtatttctcaaataatattaacgtcttccccattttctctctgaaggaccattaatgaaagcccttagtgtggtagggagatgggctgaatggaattgaaacacacacagtcatgtttagtcctttgagacaatagtgtcaaaagaaagtaaatgcccttcttctaagttcaacatgagaaactggtccaatctaaatggcctttagggttgcttgaaagatttttaaattaattgtgacacatactctaacaacgaaatcttatgtttccatagcgctcttcccttataaaagcacttttttcttgagacagagtctcgctctgttgcccaggctggagtgcagtggcacgatcttggctcgctgcaacctccacctcctgggttcaagcgattctcctgcctcagcctcctgagtagctgggattacaggcgtgtgccaccaagcccaggtaatttttgtatttttagtagagatggcgtgtcatcccatgttggccaggctggtcttgaactcatggcctcaagtgatctgcttgcctcagcctcccaaagtgctgggattacagacatgagccaccacgcctggccaaaagcactttttatatacgtcctattttagtcttacaaagtgaggtcagttgaccagagatttttacccccatcttcacatgagaaaactgaggcccagtggggttaaatggttcaccaaagtcctgactccggagaaagatataacttgtgagaaatcacggtcttacacaatggacgtggatatccttcctcagactcaggaagcaagacagcaggcacagaaggagaagtcaaaccgtggccagcgcgtgcattgccacttgcctctggatgtgacacccagccagggtgcaggtgaggcttgcaaagctctctggccactctgattatgtttttcactgcatgctcttgcgactgaggtatgctggagagatactctcatgccagctattcggagaaacataactaatcctggcatcaggcctaatgggccacagacgaggctgtcagacacagtcaggtttgccaccctcggccccagggtccttccttcagtcctccaaggtttcccatccatacacttcaccaacatcccatccagagtggtgagttgttgcttctggcaacttccaaaatggctctgtcatgattcaaaatttgaattgcctgttacaacttgcagagaatggacatgaaaaataacacaatggcgtagacctgatttcaggagctgtgaagggcctggacttcctttaagaccaaatggagtgaaataacttatgagcccttggaaatatttcctctgaaaaatggtagtatgatatttatttatcacatttcaggtgggatgagtgagtgctgacatattcaatttgaagaatttgttacttgaaacccttgttttatctttaaagttagaatctccccacattgaaagtagaaactgaagtaatttaccttaaagctttagaatgtcatttgttttaacaagtttcatatacaattttcttttctcttaaactttctggacagatctttttattctccagtattaatgggttgagcgtggaagaggtatcgcctgtgaaatcatttttgatttttttcaccaaattgctggtttctcacaggttttgtccatagtgttgtattcagaattggttccatctgctaaattgactgatccagagcatacataggaccaggttatcctgattgtaaacactctgtgcctataaaccagacactttagggggtgtattaactcattcagatcattagtaaattgccaaaattacattaaaatgatactttataaatctgtaagtagagaactgacaaaaatagctcactgggttacccaaatgtggaatgatgcatgtaaaatacagtgttggcaaaactagggaaaatacagctgttcaaatggatgtggattccccaggtgtgctctgtgtgtgtgtgtgtgtgtgtgtgtgtttattgcaactaatactaatatgctgtttcaaccaaaacattcatctggaaggaagacaatttgctttaaaaaaaattccccaaggtgagcttttggtgcttaccctgattctgcattgacttctatttcctccataaaataaatgctttacatactacccattaatgaagcagaggtctgttacctatgactgagtttccacccaggaagtctgttccataatctacagtgtcctgaggaacttttcctaatgttgtcctgggaccatggcttttcacatcacagggagtcatttgaagggaatatgtaggtagagatggattaaattctaaggtgtttttttttttaaggagggtatgatttggggaaaacaggtgcacacattagagatgattatttggatatttttaactgattgttttgttttgtagaaattaccaaaaaaaaaaaaagaaagaaattaccaatatgattttgaccattttggtcaagttgactaattaattcagcttaaaaaatcagtgcaatgattatactaatttcatgtcaacacaccttaaagaaaatgtatgatatttgaaaaagcctcttagattttgatgatgaagcatcaccaaaaagacaattcttcgagaaccaccactgttcaggtagaattacgcttacaaataaattacctgtgtagcatcaactttccattttacttacagttttggtttcttactgtttgatgccagtgtctatttgaaacaaacactcatagttatggtctagagaagaattatttttctttcagggatatctcaactttaagactaaaagggatacaggcatccttttgtctaaatcccttattttgcataaattcagaggttaagtgatttgaaagaccacagaggaagttaatgacagaacctggactagaatcttagcatccctgctcctactccattgtaacaagatgaaaatggatttgagtctctgttgaggctggtgtcctgaagaccaagcaagcatgtttaaaccccagcctatccctacttatttgctgactggcaaatgacgcctatgaaattgaacaatcactgcagaagctttaacttacatggttggactacatctagagcagggtttcttggtctgagcaatactgacattttgatttgcataatctttttcttttggagggattgacctgtgcaagataggatgttgaacagtgtcccaggcctctgctcactagaagcacatagcatacatacacatgtaagtcataaaacccaaatactgtctccagacattgctagatatcctacttagggaacaatcacccccacttgaaaaccgctggcgtaaaagatcctaaaattcatttttttcatataatcagccttttgaaagaaaaaaattcattgttgtttggctggcttttatcacttcttgactgcttgtagatattatttgaacagaaccgtagttcttttgttttccaaaaatacagatgtgtttgtttgccttatgcaggaaaatagcttcataaaccttcctgcttatttatcttaggcttccctatttttagcttttaaaagtgaactgtttttagctaaataaatacagatgttattttagaagcctgtacaattgggtctcaaaatgcactaataaggatgggattaagaaaaggaagcacaggataaaattgcaaattatcattgacaagatttaggcaaaataagactgaaattagctctttgacacatgaacgttgtatgtcactgacctttgcctacctagttttgtttttatgtggtatgtaaatcagagagttcttgggttattttttttaattcaaatataatcaagagtaaagaattgtggttgaaaaggctgtctattggttaataacttatcttttcatgggaaagataatattaagtttccacttctgtaacctaaatagcaacacattaaaagctatcaattaccaaccagtttcatatctgtggaccaataaggaggcaaagttgatggtttcacatctgttttgggtgaaaggctgttcctgtctgtggtatttaaaatttaaagaacttctgttattatacaattgggaatcctcagggagtaaaatgttaatgaaatccataacatgcacagattttatgatagcagttttaagaaattcctttggtggagtttgttgatttctgtcccagcggtaataattgcaccttttacagagtgcattaatgttcacatttaggagcaatggctacatttatgtcgcgtgtgaggtaacacaccaactcctaagctttaaatactttcatatcgtaatttgaaagcaccagagcaaaaaaatatgtgttcttcagaactggcagaacccacactttaaaactcctctagcacatccacagccaccttctccaaaggtgagagagagctgaaccctgtaaattccaaagccctggtgtggatgaggattttgtacccttgtatagttctcattttatgcaccatttgaaagcaccacatcaaaatggcaattttgatccacgtcagaatagcaattttggatgctgatctgaaacataggcagacgcaagcatgcatgcacacacacacacacacacacacacacacacaaacctctaccctccttctccactctccttctccttccctccctccctcccttagccatctaatctcattcaattctggattcaaataaagagaggaaagtagattaaattttaaaatgctctataaatcccaatagtaataaaatacattatgcttttatatttccaactattgaacagagtaagtgtttgagactaattgcacatgttaggattgaggatgatgacatatgcacttgtgcatgtgacttgggcacttttttcccagctctgtttaccccaaggggtgaaaaatgcacttatgtatggcattattctaattgccttctttcaggagaatgagatgtctcaattctaccaaagttttattcttcctacaattccaatgctttaaacttctaactacatattttggatctagaaaaataaataaataagctcctttattcttttagctagcctgagaaggctatcagtgaaattctccaggggatgggtgatcggaccagacaggtgcttgggttgtttcaagcatttaaaattctgtgattctattaaaaataaatttactcaatcagctagtgccctgagcttgcctaagatgaacatataaatatatggagtatggctggaatttgtcttaaacactatgataattatgtgaggcagcacatagcaaattttttaattaacaagattttttttcttagatcaaataatcgttcaggttggcttcatcgggaagcttctctggggatttcacatagaaacttcactcgcggggcctttttccttggtgcttttgtgctatcttgtaagaaagtgcagcccacagggggagataagatgaagcccaaacggttcatctttcatgtccctccagtctttgaaggaaatatctgtaaggcatgggcttacccaccattacagactgttcacaccttaaagtcttgccaaaatctgctattttcttccttccttaagaagacaaataccatgttccattctgagtagtttgtaggccataatactaacccagaaagaagaaaagaaaaggcagcaccagggatccagctgtatgaagaaactcattatacttgtcttatctgtctagccttggtgtgtttacctagggctaaagctgatgcaggtagatcccatctcagaataaaagaccaagacccaggtagacccaaaggcaaatggctacaggtgcaagaaatttcacagagccttaagtttgaggatctggaaataaaatacacatttccagtgggaaacactcatgataatgaaaagaagttagaaaatcatatgaaatgtgaaatactgaagaaaaattttttgatatttctggaggtacacagagtttagggggagaagagaaaagaattttttgaagttttccaccttaaaaaatggggtgtaacatgcagaattttactggccaggttatttaaacatacctttaaaaatcaaaactaatcattgccagtctcaatcagcaacattttatagcacgtacattatattacttctttagttttaatgtagtttctaaatattgtatatatttataaggatgctgttatttatttggaaagctccaatataaaatggcaagaattcatttatttaacaatcatttaccacgtaaagaaaaatcagacaatacttttgttcatttaacatgatatttcctctaaaatcaaccacttgtaaataggtgaattcatttattgagcatcttacatgaccttcatctggacagccctgtgtcttctggggggagtaaaaggaggcaggaagaggtgatttgggattcaacctctatatgctgaaattcagctccgactatcaacttctgtaatacagtagtccagtttccttagtggaagaatgttgctgttcttccagaagggtttaatacaaacatctatttatctagttatctttctttaaagtgtctagatttcgaatatttatgtttctcatataaaattcatctgaattaaaatctttgtatcaaaaataattcaaacagattaagaatcaattcatttctttttcaatactggaatgtattaaaatcattcaaagtgatatgttttaatccttaactttgcatctaaaactataatggcaacgtgagaggatttccattgctctgaaaacctctaagattgtatgaaaggaatgtcttttttttttttagcctttccaaacatgtgccttagccctattttttctgtcaaagatgcaccccacacacaccaccaccaccaccaccacacacatacaacagcacagtcctgttcaccaaaaaggcatttcacctcttgtcacctccaagtgtgtggttgaaatagaggtatccaaccgtgttttaagaacggttccagtgaatagatgagccacagctgccactatgttaaggacttcaggcagtgctagggaggaataacacgatgtagttagtgtgacatctgtgtttgtcctcctatggtttaaagttgttgtacagatgcattttttccattgggtgaccctggctgaaatgcatgagattagtatcgatagatttttttttcctggaacatgaaaagaatttgagttctgtccactgactgcatttggatagcaaagggagcacatgtcttcagagcacggaataatgctatgccttgcccctttctcccaagaggagcacagaaaccacagataactgggtaacattttttccttcctcattttcattttctacctccacacatggcgtttctattttgactgcctttctcctgccctaggctggcctttgctcagttccaaacatctgctgtgaattctaattacacaagattttcttggagagtcattctttgaaaattcatttttgcaaggctttccccatccccttaatgtgagcttcaaaaacaaatcagcatatacagctcctggctgaatgataagcttccaacagggaaatgcagttgaccaaatattaaattgagaagttcacttcatctgttctcaggaatgattggcattccttcagagactaactgtttacccacaatttctgacaaccagctgtacctaggcagcctgttctttctcttcgttcttgtctccagggtagcattcgttataaccttaggctggcagccgactttaatctcagtaatcccatcagctccttgcaggatttttaatgccaaggagagttttttggacacctgcacttccaagttctccatcagcacaggaaactctcattaccaggagaggcccacctagatcactgggaaatacatggaaaattggtgtaaaaagatgctgtcaaactttataggccaagagactgatttagaccatcaccctcatctgcaagtctttagtttccagaaattcatccttgtgtttgtttttgaaaccaagcttaaaggggaaggtagacaaattaaagccatgattaactgcaaaaccaataatcagcaacgcatttgtttgtgctggaatagacagatgctgtttgagtaaaagtgtgtgtttatcttgagccacttagaaatcacccaatcgtgcagataaaactttatgggtagcatagaataacagcttttaaaagaaaaatacaccttacctgtacatgctatttaatactttcctagtcttttaggcatgaaaatttctttaaactgctgaaaacctggagaggtgtgtgtgtgtctgtgtgtgtgtgaataacttcaccttggaaaggtgtcagacatccttgcctcactgcacagccacctccaagacttcttccatgaggctttttttgtgaggctgcttctcagagaccatgagacaaagaaacgcacagattgcaaaaggcctgaagtctatattcatttcctatccacagaaagctccaattccaacaacttataaaagatcatatgttaatttggtaaaaccattttgatgcggtcactctagtgatgcagtcaaattctgatgttgttctattttcaaaaatacaggaagggtatgggagaagtctgagataccaggtaggtaaacatctgatacataaacatcctgtggacgtcatgcttgcaaataaccttagctctaaaataagaaggttgagacgaggtttgagtgaggtatttgagagcataatagatatagcgaaaaatgtatttaatctctgatgcctttgggggtaactccaggaagagaaccactattaagttagggagaggtcatttgagaaataaataaaaaggaatacttcacacagtgtggacctagccagtgaaattcatcagttagcagactctagttttaagtggtgaacttttcaaaggactagaaagtttatgatttattgtaatatttgcagttagaaatgctaagataagagtagtcacattcctagcttaagggtataagtcagttgctcaaacaccttaacattgactttaatgacaggcagtttggaggaaaggagtttcagatcttgccggcaatgccagacttacataacatcgaatttaaattcaacaaacatttattgagcatctgttaagaattaggcactatatgtgaaaataggtgaatctgaagtgaagaagacccccattttttttttttgagacagggtcttcctctgttgcccaggctggagtgcagtggcacgattgcagctcactgcagcatcgacctcctgggctcaagtgatcctctcctcagcctcccaagtagctggactacaggagcatgccactacacctggctaattttcttatattttgtagagacagggtctcaccaggttgcccaggctgatcttgaactcctgagctcaagtgatccacctgtttcagcctcccaaagtgctgggattataggcatgagccaccgtgcctggcctaaagtgaaggagactctctctctccttcaaaggaattataatctaggtactactggcaaaactatgcgcacacatacacacacacacacacacacacacacagaggcacccactccaattacccaaaagactaagtaaaaaaatattaggtcacattctcatggttaatatgtgtacatatgcatcatcgtgatcttcatagtagccatgcagaatgactaaatgaggtaagcattggcatttctgtttgagagtagaggaaactaagacttgaatggactaagtaacttgcttaacattatccaggtcactcctgcaggtcaaagctacaaagctacttctggggtctgtgcttttttccaccatatgctgcctgcatcaccccagttttctctctgttgtaccagaatgcattgattcattttaatgcaatctgttcactctgtattgtgatttactatttacttgactctttccctcactgtctagagggcaggaatcttatcaccttcactccctttcacccaagcacctagcacttatttgtgttatgaatgaataatagccacccatgaagttctctccacactggactggatattagaaacacaactgctcatcattagaagatcatgctctgaactcatgaacttctccttaaatgtttgaggcgagaacagtgtgatttcaacagaagcgtgaatctttaaagaaagcatccacagtttctgtgccatttcattgacaggttttattttaaatgtagacatccacagaggataggagctgcagcgtgtgctgctagactcaagagagaagtctcgctgactcatgcaggttgaggttttgtctcattcccaggaatgcttggactcccagaggcagtgaagccacacattttagcagaattacctcagcagtgtggtgcatgatcatgaacttcaagtttacctacaaggaagatttcattgtccttctgtcactagccaaacacttcacagcctagactcctggactacataaaggcccatacaaaagtgtttgtgtgcatttgtgtatgtgtgagtgtgtgtgtttgcagtgggagaggacacttatctttgctctccgaaggaattttgccatgagataccagatagaaggaaaatattcatcgggccgggcctggtggctcacacttgtaatcccagcggggaggccaaggtgggcagatcacttgaggtcaggagaactgcctggccaacaggacacaaccccatctccattaaaaatacaaaaattagctgggcatggtgacacacccctgtagtcccagcgactataatcacttgaactcaagaggtggaggttgcagtgagctgagatccaccgttgcactccagcctgggcaacagagccagactccatctcaaaaaaaaaaaaaaaaaaaaagaagaaggaaaatattcatcatagcaaatattttcaaatgtaagcaattgggtgggatttgtgtgtgtgtgtgtgtgtgtgtgtgtgtgcgcgcgcatgtgtgtttcttctgccgttagttcatcaaagctggccgcttctgcttccccagccaaagtccaaccccctgtcctatgaggtccactttgaatggttcaaatgacctgttttccatcaagccctttctagacccttccagaagtaattttcccttcttctgaatcccataatgccccacttatcactaggctgacactttttactttcagtctcataacatcattacctccacataggcttgtgtgcttccagatcctggcatacagtaaatgtgtgttggatttaatggacgaaatgcttttatctggatacttggcattcttcagtttcgtgtaatttcacacttttagtttgagtggctacgatgtgtgaagctccatgattgggctttgggatgcagctgtgtgagcagacactctgggctccatagtttatcagttgctaggctccaagcagaggtaataattgctcagaaagaccaggagtgtgaaaaaaaaagaagaaaaaaaaggtcttaattgcgctacgtctcagcttcattatctataaaacctgtctgcgggacagttaagaaaatggaagatgaggtacaggaagttagcacttagtacaatacctgacacataatggttgccccagagaagtttttaatagtaacaaaaacaataatcgtcagcaatactttatcaacacaatacagtcctactgaattatgtgcagagatcaccaattctgctaccatgtcttaaagtggctgaaatccaaaccagccgttaactcattcttctattactgttaccctctttgttttagggctgacaaatattaggaacgggtgacctgtatacacactctatttaatcttacagggtatctagagctgtacccttgcagtcaaccagatcagcagcactgaacccaaacgtttctcttgcctacctaacccatgcaattcctaccctctcggtcttctactagacgaatactttcctagctttcatggatattacacataaacaatcagatggaatcaagagttatattagaagagcacaatacccacccatgccctctatgtagtacgtgcttgctaactctttattaagtaaacccatctagcaagagcacatgcgctgattctcctatgaggttcttgaccggaagattttcatcccatgtatacatatttgagactgattaccattgttttaaaactgtagcatacttattttttctctgttaagaaatttcagttaggcaatttctatcagacagtttttaagttaaaatcttagccaaattcctagggattacatttggtctgttctgacagcgtgtcctctttccaaatcaaaggactaggctcaggttttaaattaaatgtaacttacaaataagcattcaaaaaatgttaattaaaagtattaagtccctgaatcttttactgcctggaaagaactcctaagtctctttgcaggaaggggaggaggggacattaaaatgtcatctttttgaccaagctgttaaaggtttccaaggtattcatctgcaagttaacatgcaattgaaggaaaatattttaaaggagaaaagatttcacaggtcggcgtatgtcttaaaaatgtaaaacaatcttttctaaagcatagagatgtaatcagccattctctttgactctacataagagtttcaaattgcattagatgttgattacttgtatttcagagtgtatagaaaccccagcaccatttcattttctccctctttgttatcagaatgtagtgtgtcctggtgtccagatttttacgggtttatcaagtaagagaggaatgtaaatggaatatttgtctggttttggtgaatacaattgtatctgctctagataatatggaaaaggaaaaaagccctcaggttttgcgtccaatgcatgaagactgtcttctcatatttgtcttaaatgtgtttcataaaataagctgagcgttttctggtggcttgccacagttccgtgcgttgctctcaaacaaaggcctttcagagcctgatgctgtttccatcacactaagaaaatgcagagcaatggtagtgactccacctgaaaatggcattcttcaccttcacatttgatctttatggtttccagattggagtgatttgggtagctggattctggaaaagtctctagctgaaatgctggagtgttaacctgctgcatcgagtcccttttgtttcttttggacaatgctacttgccagttttaacaactacagcagattttactattcaaacagaaccagatgggactccagttcaaagaacatgtcagaattaaatatttcttttttaattagttgctcctgatttatgcaaaaagaaaaattcacatgagagtgggagaatgtgttataaatccagatgtgacagagcccatgtaagcactatctcctttcatctgccaaaaaagacggaggtcagcccttgtgtggggccttcatttttcttactcattttcttgttgttcttttgctgtgactgcagtggcagtcagggaagccagcccttccactgcccctgtgctgttgcagccttatctcatgttattctaactggctggatcaagtcttctggtaggaaaattcatctgttcattcacttgggactgttttactatgagcaaaggttttatttgtttccacccaggaaaatgctctcctttaatttaactatggaaaaaggcattaattcaggcaattaagactaaaagaaaattcgtgagatttttcctgccttgcgctgttcttctacttgggtatttttattctttaccctaattttaaagtgttcaattgttatcctttgctcaaaatgtttcgttgctaccattttgtttttcgacagcatgaataaattatttgcaaagttttgtttttcagtggccagtgctaactttaaactaatagtcaacacaatcagaaatcatttcatattccttataattatataaaataatgaatctccaaaaagaaaagctattggatttaattattattactgagaaattataaactatctttctaatcattatggttataaaatatgaattggggaatagcataggtgtagcagctcatacacgggccaccagtcttctctggggtataagtcctgggtcaaacactggtaagttatgtgactctgagaaaggtacatatcactttgttcctctgtttctttgtccataaaatgtcccttgtatgattgttgtgagaattgaaagagacactgtacataaatttaacccttcataaaatgcctaacacgtagaggttgcactatgaatttccggttattaatggtaattttagccttagccatcagcattttttctaggtaataccaccatagggacacaacacagaaagagatagggagctatgtcactaactctaaagcgactgcattcagattcataacagtaagaagtccaggatcctaagttaatgagcacaatggtcaggtactgtgagttaagcccacagagcctagaatagcattgatgttcacaggcccaggctctgtaaaaaacatgtgttttatctaaggaaatgagacaattgcttaaaaatattttctttagcttgtagtgtcaagtgatgaattaaacagctctttgagtcatcagagatgccccaaagaaaatccgacagtctccccctcaaaaaatattttcctgtttttaatcagacctcagctctttgtcctctattttttcaggccattgtattgacctgccttgggagtgttaaaagctggtaaacgctcccttgccaatgctagctcaatgggcagtaatttattgagtaagacagattttcattttagaaatgaggctttccacgttatgacattaccaatattggttggttatgtattattatagaaagcagtgatattcatttcatggctggaaggctgcgtgctggtgtttaaccagcagtttgcaaagatttgctacatgatttactacacatgctgctttgtcctcaagtgattcctggtaaaatgtgtgcttctccttgcttctctttgtctggggaatgtgtttcctgtcattactaagacaataccatggccatatggtgcatgtggatggttcctgtagatatcttacaacaaagagtaagttgggagcatggtagaacccagtgccgtggggaggtgggagttcgccacccaggaactgcaaacatcgccccttcacccctagaagtggtgaggaaaactgttttcctctactcacacaattttccccacccagaaggaaaggcttggggtttcctcttctgtatctgctaacaagatcttctcattgtgagtggagcacagtgtgaaagtaagttgtgggtagactttccaccaccagtgttagaatttcatatccatattggaaacagggtattgtgttgggtcacatttctaatcattatagtgccaacggcgctatgtattataacttagaaagtggtcaccagctgggcacggtggctcatgcctgtaatcccagcattttgggaggccaaggcgggcagatcacttgaggtcaggagttcaagaccagcctggccaacatggtgaaaccccatctctactaaaaaaaaaatacaaaaattagctgggcgtgagagcgggggcctacaatcccaactactctgaaggctgaggcaggagaattgcttgaacctgggaggtggaggttgcagttagctgagatctcgccattgcactctagccaggggacagactgagactctgtctcaaaaaaaaaaaaaaaaaaaaaaaggaaaagaaaaagaaagcggccactagaactcaaaaggagtttgataaagttctgtaaaatagcctacatgccatcgataaataccagatgtttatgtttgtcacacacacagagggaaatgttcaacaatttcagtgaatgcatttgatgttccattccatccctgcccaccgccatcatcacaccccctcaccatcacccttaatgttaaacagaagtatatccaactcagatgtgaaatcacatccatcttctaattaaaaataaagcagctgtgaaataatgatattctttcaaaataagaaaatggtgattagagcagagctgattgggttgagggaaagcaggttacttaattatggttattgtgtgtctgaatttttatggaaagaaaggaagtattgtttaggacgatgaaccctccaaaacatagaggggtggcattgtgtagaagtactctgggttgtgtctttgtcttttcagctgcttgtcttgggtcaccagtcttgcctattagcatgtgacgttgatgagaacttagcatgattcaaaaagctaagccaccaagacgatgggtagtgtttgatttggagtgggttttatgactactgatcatttcaacttcaaaacaaccagagctcatattctttagagagcaatacattttttttgacaagtaatgtcaatagtggtgagggaaacataataggttgtttagtgtccatgatttcattcatttattttttcctgcttatctctgcaattcctgctcctcctcgtccctggaacagtcttttcctttgtgtccactcacaagctcctactgtttatcccccatagccatcttgagcatagaaatcagctcccctcacctccagttctctgttaaattgtttaccttttccttgatgctgcatgatacctgtctgtacggtagtcatgggttcgcgttttgcacactcttactgctctttatatcctaacaacttaatatagaacttagcagataagcagtattaaatgcccgctgataatgttaatccagttgagtaagatccaatacctaaatattcacagccactaaaaattatgatgtagaaaaaatagtggcactagaacgtctataaaactccattataaagccagttatcaggcatagaggtaatatgaccttatttttcaaagtaaaaacatgcatacaaatattcacaggtactttgcatgggaaaagaaactctgcaaggctatgattggtaattatttcctaatgatggtcttagggagacttaattttcttctatcatctttactgcattttatgaattttcagtaggcatttattagtttttctgcagggaaaaacagatgcttttcaaaggaaatccacacaacaatctagaaggaggtacagcaaaaacagaatgatgaattcagtgatggggacatgagctataaaggggtttagcctactaggccaaaaagaggaaaaagtcatttccagtcaaaaaacagacagaggttgttttagggcaaaggaactttgtatgtcaagacatgcagctagaaaaggcttatattctgttacaagcaacgaatattataatatggctgggtgatacagttggaaagagagaggtgtagcaggaggctaaaaaggtagattgaagccaatgtcatgactagcagagacatctacaccagtgagaaaggcttgtaagggaaggagaaaacttttcatctactctttaaggtgttgcaactggggcctgcaaattaaactgacaaaagacagattaacaggaaaaaaggcattaatattttaaattttacatgcacagaagccttacagaaaagaaatgaaaaaccaaagaaatagattcagatgcttatacaccattttcacaatgggtgataagttgtggataagtgacttgagaaaagaaagagggtttgggcttctagggcggataagttgtaggaaagtgactaggagatacatacacacacacacacacacacacacacacacacacacacacatatatgagaaactaatggaaaataggagttattttagtaagatgtgtttatgcaaattttatctcagtctccactgataaatgttgctgtcttcatcgtggtagagtagagggggagaatttatgcccccttcccaaaaggaaatgtatctcctgcttttaggcagagaaggggagggcatagaattcttcttgcatctgttgattctcgattgccttcaactcgaaataatcttcatgccaaagtggcaaattttgggggtggtgtcttccagaactcttcagatatgaacaccaaggcatgaagtctttctaggtctcctgacacagacaccagcagtgtgagcagtgatgcttattgagcaggactttatctgtctcccctcaaactctctcaggcacttgagagtggagggcagatccttgttgagaattcccctaaggcattaagagaaaggactcgtggaaagaacttccctggtcttagcagtgagggttgcacactaagtgctggagaggctgtatgttgttagagttctgggtactatccggttttagttgcagtggttcaagccccagtcctaatcactttgtgaggttgtcatccatccttactaaacccactggcaataatcttagggagaaaaatgaaatgaaatttcaagtatccctgtgtggtaaataagagaatctgcagagttttaaagcacagcaggaaactatgcaattacaagaggaggttgccaatgcatttcattgctgttgagaaaaaaaaaatctttcttttttaatgagtgattcatgcatatgctttgggtgcctttgtatcttcctgtgttggatactagttaattccagtcaattgctccttcctctgatgtcagctgttcctaatacctaggaatcttctgtttgatcaccagttaacttctttcctacttagtaattaaatcttactccaaaaaccaaaatttaaaaaatagaaaaaggacaaccagggaatgaagttctagggttgtttcaaatcagcccaagctgaatacacactcttgggaatttaatcatttccaaactaaagagccatctgtaagtttgacaggaagagtttatttaaatagctctgcttcatgcttcctcggacttcaagattttaaggacccttcagcttgaaagtagctgtggcattgggcatgactttaatggacagtcagaaaagcactaagtgatctgcgagcatttgaaaacagttaacattgttcagagcaaccatttttagagtccccattaacttttagattgcggcattgtgaaatcagagagtttctgcagcaacttaaaatcacctatttgtctggaatatagtgagatttagggttgtcagataacatagatacagaaaatccatttaaatttgaattttatgtaagcaatgaatcagttgttagtgtaactacagcccaaatgttgtatggaacacacttatactaaaaaaaatttggttttgcctgacattcaaatttaactgatgttttgtacttttatttgctaaatctgacaaccttcaatcacctcccctttttgaaatgtgtacatgagggagataggaagtttaaaacattcatcaaagtaccatggttcacttttgaaaaacaaatgcaaattttggtaaacaagtgtaggcacttgataagaatatgttggtaaaatacttattcattaaattaaaattataaaatctattgttagtattctaaaatattaaattctattaaattcttgttcctttttctcttaaatctggtgaaagcacacagagcctagagtttatatctttaaaaccagggaaatgaaataaagattattttgcgttgaatgatagtcccattctttccagatgaaatctaccactactgctttctgtaacttcaaattggcttctatgtgctgtttttcctggatgtagacaacatgttgatttaactactccaagcgccttcaggaaaaaagcaattcatgaaagacaatatgcctccatgaggcaggctgtgcatagaatggaaattctttaagtgttcgtggcccatgggcactggagaattaattgaaatattatattctgaaaattgagttgtaatatggcaactggaaagcaaaattcaaaagttgggagggggttggctttttttatttgttttgttttattttatttttattttatttttcgagtcagagtttctctctgtcagtcacccaggctggagtgcggtggcgagatctcagctcactgcggcgtctgcctccagggttcaggagattctactgcctcagcctcccgagtagttgggattacaggcatgtgccactatgccaggcttgtcaatgctagtagttgtaatgtgtaactattttctgtgtcctttaaaaaaatatttgccatatatttgtggacttttttttaagcttgtgtttaaagctgggcatacaattgatggagcaaataattttataggaataatcaaatttattaaaataaattgaaaatatcactattatatacaaactagtaatgagttttctttcaagattattcttagttattaatgctggtaataaggagagttaaagaaaaaaaaacctactctactggaaacatctaacacattatgaaagaaggaattataggaggtcagagtggaaaagagtcttccaagttatctaatcccactccttcattttacaaatgagggcccagaagcctaaagatgatggcagagtctggactagaacatggagtgcttgctgcttaaatccattccttcccactcacatcacagggccctgggatgaaaacacagaccctcgagatttcagtcaccctctggtcatcactactctgatgccttccaagagccccacccctcaggatatgagacaggctagtgagagatgaaggcaaggctgtcgtgttgaggagtttttccactggaaacttaccaggagaaggttgcaagcccaagcagttgtttcctagagacatcagtctcccccacctgatgacttggaatccacctgcctctcaaactgagctgcaaggagagaggccacaggaagatgtggggagggaagaaatctaaagctgaaacagaaatctttaccctcttcctctttactccatcccaagttataaatctatggcccctctcccaaaccacaacacccttagagctttcaagtcagtatcgtttcagtctgcatttaatgtggaaggaggtaggatgccaaagacagaggggaaatgggattatgttagacaggaattcaagtccaggcctctccattatccattgtgtgagtttatcttgtttgtcttgattctgtctttgcaagatgacatatatgaatgtgcagtttggaaagtatgatattgaatccagttttctcttttgcaccagggatcaagcaatcctggttgcaacagtgagaaaggtcttttcctggccttcctaacaatgggaaccaacttagggccatgctgtcttttgtggacaaaaagagtcaaactctataaaatatttgaagagatttattctgagacaaatatgagtgagcagtggcttgtgacacagaacctcaggaggtcctgaggacataaacccaaggtggtctgggtacagcttggttttatatatttcagggagacatgagacatcaatcagatacatagaagatgtacattggtttggtccagaaaggtgggacatctgaaaacaggggctcccaagtcataggtggattcaaagattttctgattggcaatggttgaaagagttaagttactgtctaaagacttaggaatgtctgggttaagataacgtacaggtaaagaccaggtagcaggcttcagagagaatatgttgtagatgtttcttatcagacttaaagagctgttctatcattaattccaacagagatgagggtataataatgaggcttgtctgaccctcacactgtcctatcatagcctgaactagtttttcaggttagctttggaatgcccttgctgggacaaggtgtccatttagatggtcaggggacttagaattttatttttggtttacattgatcatgcctttgcctttttttaagaaggaatggaagggaggagtcagggactgtggacacccgatggaatgaggccctgttgatcccaggtggatgaaaaccacaacgtggagcccacaggaaaagatgctttgggttactgtgctgcagggatggtgcactgaccacgcttgtacttgtcttgcaggtagacttgggccttctgcgctttgtcacggctgtcgggacacagggcgccatttcaaaagaaaccaagaagaaatattatgtcaagacttacaagatcgacgttagctccaacggggaagactggatcaccataaaagaaggaaacaaacctgttgtaagttaggctgccaccgtggcaaccaatttggtcttttaaatggatgatcaatttttacttgtttgtttggtagctttctgtctggcctggtttatttttgaattgatttgaaatgaaaagtgcaattagaggtttaaatctaaccaaggggtctcatgttcccagatccagaagccgggaggaaattatgtgaatgtttccaaaaaaagtcaatacaggccaaattaagtgtcagactcaagaattgctgtaagccccccatggggacacagattctgcgtgggataaacactgtcctcttagaaccttaggaatttggggttttgttgtttttcccccctcgatttcttcatcctttcatagattctttctgtctgtaatcagctagttttagaaaacatcttttcatctatctactgtggctcacaaactaatttacaagtgcatttgactgcttcttgtaagaacgcgtggaaccaaaggtatttcattgtgttccctcagatcacacaaataacacactacctccgtactgctttcaaccaaggaggcagcacagaccataccgtgtccctcggcgctctgccctagctcatttggaacagagatgtttttctcagcctgcctgtttatttgaagttacacttgctctgattttctaatcaaaagatttcggagaattcatactcaccatctcccagaaattaaaagcttgccctggaggctgagcaaaacacaggaaattgatgaggataggagcaaagatccaggtagcttgcaatgatgggcttgggaagaggccaattaacctgtctctcttttgagcattcacgtacttgattttctccttgtggatctggaactgagaaaagccccctgggtgtgaagtgagaaaatctattaattccctttgattagcagtgaaacccccactctcggacagggcaggcaagatggaagcagctacagatagacagctgttctgtaggaggaaaatgctatgggcaggcaagttcaaggccattgtctagtcctggaggacatggaaccagtttgtctggggtacaagaaccttcctagtcaacgctcatggagatgaagtgagtaaattttgaccccaagtttcatgactgattcttgtttgggaataaatttctgaagacatactttaggttcaaggaaataaaaaatcactaactctaatgaggcacctaccagccaaagaacccagagagagccgggagagctgaccttagactgtcaggccatttctttttaaaataagcgctacttcaggaggagaaaaccaaacaacacatgttcttacttataactgggagctgaatgatgagaacacatggatgcattgcagggaacaacacacactgggacttgtcggtagcggggtatgtgggaggacggagagcatcaggaaaaatagctaatggatgctgggcttaataccaaggtgatgggatgatctgtgcagtaaaccaccttggcacacagttacctgtgtaacaaacctatacatcctgcacaggtaccctgaaacttaaaggttgaagaaaaaaaaaaaaaagaacaaaatggaaccatgaggtgaaaggtctaagataatgttaagtgataaacttaactggtatttcattatctttatactggaatgcatgcagataagagggatgaaagaaaatagcaacatgaccattttttgttaaggaaaaaaaaaccatacgggctatttcaccaacatgttttcttcaactgttgtccactggttgtttgcatggcccagaagaggggggctgtcggagagcacccacagattacaggggtgtttgacagtgcccccagcttgccctgggaacccctggcacacagaagggcttcaaggggagaggcagaaggaataaggaaggagtcggcagagagcttggcatctgttctgagcactttagctgaatctaatgaaatcagaatctaatgaaaccagaacatccacctagagcctcatgattgttgcccaccccacctttctctgtactttaggggctttcagccactcccctctaccttcattcccactttgctccaggagtgcagctttcgaccaccaacaactccagcaaccctcttcatgttggagagaatgtgtataaaacatgattttcagcaaacagaaaactccctcagtgggaggaaaatgcacctcccctctgcctgcaccagggcacacaactctcctgccagacttctggtctccctcggacaaggactcattgcccccataaggagagcaccatcattggcggccctccttccctggcagctgcccattactctttgtcacacaaaaatgctcccacacagattgatttccagggagagatgctgatttagggcagaaatcaaaaggccatcacaggctgggataaattaggatatcagatcgtctcaagagagagatcaggctaaaaactgacttatttaaacaaaaatagagaccaagtcttgctctgtcacccatgctggagtgcagtggtgcaatcataactcactgcagccttaaattcctgggctcaagccatcctcccagctaaatctcccaagtagctgagaccacaggcatgcaccaccaccatacctggctaatttttttttttttttaatggagagatggagtctcactatgttgcccaggctggtctcaaactcctggcctcaagcaatcctcctgccttggcctcctaaagttttggaattactggcatgagccaccacacccagccacaaccaactctgtaaagcatttgaccacctttagttgtgcaggccacttaaattcaataaagtgaaaacacaagcccgactttcacaagccctttctcccaggtggaagagcaggacttgggaaaccatagaccttcatgtcctcacctggaaagatggggaggaagctgcatgcctcgagtgagccccgtgatgctccagttatgcagcctaaaaggaggtgtctgacccagctgtgctgagaagcatagtgctgaatgcacgaggcacaggactgagaaacatcaccatcccacgggctgttcccaacccaaggcagaattaaaatccaggaaagggaggcagagtattctgtaatggtaaactctctagtcctcagagatcttactggagaatgctgctgcagccccccgcccaggcagagtggcccccacgagtccttgtgggaaacatccattcatgcctggcatgcattacatttgcagtcacatgcctcatctttcttagaataaaatgactcaatttaaaactaaaagcagaatcccagcactttgggagacggaggcaggaggatgacttgaagtaaggaattcaacaccagcctggccaaccaacatggtgaaaccccatctctaccaaaaatacaaaaattagctgggtgtggctgtgggcacctgtaatcctagctactcaggaggctgaggcaggagaattgcttgaacccgggaggcggaggccgcagtgagccgagatcgcatcactgcactccagcctggctaacagagcgagactccatcttaaataaataaataaataaataaataaataaataaataaatcttgacgcacaagccctggaaaaactgatttttagttaaaaataatttataactcagttttgactttgaccactaaaacataattttaccaataatcaaaaaaggattaaagtcacgcattagtgtgagggacaagatcttccatcaaggaatgaagtcaaaggggagaacgctatttgacctagtactgtagctgcaaacacgacctagaatttcaaaaagccaggccctatagtttacttaaaaagcatcccttctggggattcttgggaaagtcaaacagtgagagttcccatgacacgtctacagtattattttggtcctctggtaaagttaatagtttcacactttttagataatagcatgcgttctttaatcaatattatccatataatagtgcttttaaagactctagcctctcagaaaattgaatcgatgattaggacagtattctatattagacatcattctgattgctaattgaaaaaattaacatggcgagttattaacgccatctcatccttgatcgacaacactgaaattgtaaataatttttacaaccatttgtgaaaacacatttatggatttaaatccaaaacctctgctaaagaaaggcactttttttccccatacagctctttcagggaaacaccaaccccacagatgttgtggttgcagtattccccaaaccactgataactcgatttgtccgaatcaagcctgcaacttgggaaactggcatatctatgagatttgaagtatacggttgcaagataacaggtaagctgtggaagattgaagactgaatcttccaagtcgaagattgtcttgttttgatttatgcaaacctttaaatacagggtaaataagtttgtaaatgcaatcatttttatttgacaattaaaagcatctactttggatttagacaaatccgagttcaaatcctgccttactactcactagcagatttttttggtcaatatacttaccttttaaagccttagttatctcacctgggaaatagtcataataatttatgccatacagcctagttgtgatgatgcattattaatagataatggatataagcacgtagcacagcctggcatgtggtaggtgcttgtttactggtaccttttccactagactgtaagctccatgaaggcaagtatcatgccgttcatctctgcttcctggatactgactactacttagtagatttacaataagtaactgttgcatgaaagattctccagcagttttatttatttctttgtttctttattttgagacagggtcttgctctgtcactcaggctgcagtgcagtggcatgatcatagctcactgcaccctcaaccttccaggttcaagtgatcctcctacttcagcctcttgaatacatgtgggacaacatgagggcaccagtgtagacaactaattgtaacccctatgttgcttgggctggtctcgaactcctggactcaagctatcctcccacctcggcctcccaaagtactgggattacaggtgtgagctactgcccctggccagctttatctttttatttgtttttctttttttttttttttttttttttgagactgagccttgctctgtcacccaggttggagtgcagtgacatgattttggctcatggcaacctccacctcccaggttccagcgattctcctgcttcagcctcctgagtagctggtactactacaggagtgcaccaccacacctggctaattttttgtatttttagtagagataggttttcaccatgttggccaggctggtcttgaactcctgacctcaggtgatccacatgcctcagcctccccaaagtgctgggattacaggcgtgagccaccgcgcccagcctgtccatttgttttcttgcatgactatgctatattctgcagtatatagcagtcatattagaattcctttccattttagtaaatacattgccaaactttcattgaaacaaccaccaccaacaaaaaacctgtacaatgtgatctttatagtaagcttggaagttcaaagacagaatcagttgacccactcactaaaaagtaattaaaagcaagcaatgtctaaaagtctttgaactacctttaatattatgttatatatgtatttggggtatttaattttttattccatttttctgtttatcctctttagtttaattatttttagaggagaatgataccgactttggaaggaaaaaaaatcactttggcaatattccatgaaattacaagcaattttgagaagagctaatgaacaggaaaaactatacttgtttatagtagagttcagcttggaaagtaaaaaccaacatctgattttttaatgaaaagtttatttatttccatcccacagacagacttgtttattattttaggacctaagatttagaaagttcaaggccttagaggcaggaattgggtggagaagggtttgaaagaagaaaggacattgaaaagttagatataaccttggctttatttttgatcagcagttagatgacagaaagttctaggtcattttcagagcattacagatttgtgctgttattcataaatttgtagaaacaaggccatttgaggtttgggtggaaatttctggcccatttcttcaaccttatctcatgtcattgtatttaaaaaaaatgaggtaaacttcataaagactccaaacatgttagtcaaaattctgaatttccaggctcttagagatttatgtcacatccttttagttgaatacaattttttttatacctaaactgtcctttttaattttcacaaggatttccctgagaggtgatgctaggaatgtgagcaaagaaggtaaataatttgttcaatttttaaaaatagttaaatgatctagttatgtaaacttagatgtctaaaatagcatatcctaatattttcatacataattaagtagctatttttcaaataaggtgcttcctttcagttcctagtgctagtctcttaatcatggtctccactatacttttaaatattttctctctagtaaaatgtctctagtctccaaataattgccagaagcaggtttttggagaggctaacacgttacgatagtcacatggacagaaggcaggcagacatatccaggcttgactgtggactgtccacttagtgtatgcatgacggaccatggataagacattgagactcactctgatctccgttttctggtctgtgaggatcaccttaatgcaactataatgaggagtcaatgagaggaaatttggaacacccctggcttaaactaagtgctcactaaatggtacccgttagactaaaatagtacatggcactcaatatattgaacctagcatatgccccagcaagcagagcctctaataagacagtaatttcaagtttttcttcttgattatcagaagcagataattttcattttcttgaaatgaaaatcaaaggtccccttgagtagagattaatgaaaggaggactacagtattcctgctggactagatggtccaggagagcaggggacctgtttgcctcattttctgttgtgtcctgtatgcctggaacataacaaatgcttggtggttacttttgaatgaaggaagtgcagttttatgcacgccttctgagaaacaagcggctggacctcaaattttcaccctgctgagtagtcacaattcaatctggattttgtttaagcctacctaatgaaaggttactgcttgaacacatcacttggcttccaaagccactaaagccccaagttttaccctaattttttgattcagaaattattttttagaaatatagtaatcctggactgggcgcagtggctcactcctgtaatcccagcactttgggaggccgaggcaggtggatcacgaggtcaggagattgagaccatcctggctaacacagtgaaaccccatctctactaaaaatacaaaaaattacccaggtgtggtggcatgcacttgtagtcccagctactcagaaggctgaggcaggagaatggcgtgaacccaggaggcagagcttgcagtgagccgagattgtgccactggccactgcactccagcctgggcaacagagcaagattccatctcaaaaaaaaaaaaaagaaagaaaaaagaaatatagtaatcctggaaaattcagagtttgtcaccatatagagatataaagaaaataagattggaacaaaccattctgctttataggtgattgatgaagggcattttcattattttgacaaagtaggcttcatcattttggcagagatggaaatcacgttgggcaatggctgcttaacacactctgaactctgctatcttctgttattaaccagaagtctgttacccagcgcttcaacacatattcatgtgctcctaagtcaatcagaattcacagtgatgatctcagacaccataatatccagaggtactttctgagtcatcaaggagagattaaattatgctcattcagggtctcccatcgaatgcagttattactttctcattcgttggaaattggttaactggatatttgatttaccagtatacctcagtttttccattaaagctgagtacagagatttactgtaaaataatatcactgaaaataacgacctcaatcctccattacaaaactcatttctcccttccatcctgaagtggtcttaagctttccaaacaaggctgccaagtgaaatacaaaatgtccagttaaatttgacgcagacaaacaagacataatttttcagaataagtatgtcccatgcaatatttgagacatatgtgtactaaaaaattattcattatttctctgaattctaatttcactgggcatcttgtttcttgttttgttgtttatttgctaaatctggcaacactatttccaaagggtttgacctgcaccgggctgacctgtaccagcctgctatgaagggacagagttaaacgctagcatctcattcaaaccttgaattaattgttaatgtaatttttctgcaaattattgttaaaagtgagtcacatagttttcagtcaaaggtaaatcaagttgcctcttcatttttttttttttaatgaggcagctatatggaaggaataacagtctcactttgcaccatggatatgttggctaaatggggacagggcatcactaagtctatgaatacagaaactgtgccccagccgagtctgcattagagaaagggcattaatctggtgacggttctgctctccttacagtattcaagttaattatgtttgcctccaaatggtaacatctggtccccattaccagctaaacattgcctttctaaaagcttgtttggaatcaggcaggtatgaacaccgtggccaaaaaatggcactctatttttaacactacagtttcatagtcccttagtaaaattgtttttgtaaatctttttttaatcccgactgagtatattcttggtttccagatcccagcctggagcaaatactgtggttaagttacaggaaagggcaattgagaaaatgacagctgcctttcattgtattaagttgattcattcaacaaatatttgttgagcaaatactatgtataaaacagggcatgaagagtcatataaaacagaaaaatatgacttagttcgtgtcctcaaagaagttaaaatctggggaggcagaaagcagcattccaaagaactaaatgtgctcatcagcatttgagggctggatatggtggctcaagcctgtgaccccagcactttgggaggccaaaatggtaagatctcttgaccccagtagtttgagagcagcctgggcaacatagcgagaccaaaaaaaaaaaaattgccaatcatggtagcatccacatgtagtcctagctactcaggagactgaggtgggaggattgcttgaggccaagagttcaaggctgcagtgagccatgatcacaccactccactccagcctgggtgacagagtgagaccctgtctctaaaaataaaaattaaaaaaaaggccggggtgtagaggggccaggcgccgtggctcacacctgtaatcccagcactttgggaggccgaggcaggcatcacgaggtcaggagatcgagaccatcctggctaacactgtgaaacccctctctactaaaaatacaaaaaataagccgggcgtggtggcaggcgcctggagtcctagctactcgggaggctgaggcaggagaatggcgtgaacccgggaggtggagcttgcagtgagccaagatcgccccactgcactccagcctgggagacagagcgagactccttctcaaaaaaaaaaaaaaagaaagaaagaaagaagggaaatgcagataaaatggtgtgaagaggcccagaaatggaaaactgtgtccagttgcagagaacagaaaaactgagtaaacgatgtggcatttgaaaacaggtcaggattttaagcagttcagataatggaaaagggtaacatgacagggaattccttgtggagggaacagaaagaaagctcccaaactcccagaagtaaggaagttcttcatgccaattggcactggttaaaggagtgaatggggagaggccttgcaaggacatgacatggaaggcctgcatgcctgactgaaaatgacgtgcgtaatttctagacaagaaggcactgaatgtctgagtaaagaaacgacatgatctggaccatagaactcatgtggaaagtatctgagtaatgaattcttaaggttcagctgataatgtggacttagtttaattgcattagatgtttgcctctcacttaggggtagttatatttttaggctaaatttttattatataacgcagaattgagttgcttcaaagaaaaataggttatcattcttgcacatgttcttgattaggatgtacagtttctaaaggaaaatacttgaagtgttggacattttgtcattaagccagcgttgaattcatcaacaactgatactctccttgtgctcagaagctccttgggctgctttagaagacataaaaaggtctatgatgctgttcattgcctttgaagatcttataatctagctgtgggtacatgactaacaatcttaaagccttagagagcagtggaatgctgagctctgtgctacttacatcatatttctgagaagggagagctcagaataaaagctagagtagcttgaaaagttctcttcatgagtcttaagctgggttttgagcaaaggcaatgatgaggatgacgtctagactgtatgagaagagaattgcttaactgagatgtattgtcagtaatagaaaatcaaattaggcaaatgggatgaagtcaaaatgagggtcttgaatgccagatcgagttttgatatcttcctatcaataatggaaaaccatggtacattttcaaaagatatctcttttctattgtcggggtaaaatatacataacataaaatttaccgctttaacaattttcaaccacttttaaccattttaattttatcattgtacatttttaagtgtacaattctgtcgcattaagtacagtcacattgctgtgcaagcatcaccactatttccagaattttataattgtctcagactgaaactctgcacccatgaaacactaactctcccaatctccatttcccccaagccctggcaaccaccattttgctttctgtctctacgaatctgactgatctagtgataggctactcctatccatggaatcagaccatatttgtcctttttttgttgggcttctttcacttagcagtggagatttttgaggatgagaatgacatgcttaaaacaacattttctgaaaatttaagtagcagttggtgtagtggagattcaaagtggggtctgggaggccaaccaagagctgatgtagcaccctggccagagcgctcggatcaggataaatccagaagaaaggaaggtagcaacaagagttctgttgctttcttgtacttaataaaaacaacaggatttggcagcaaaacggaaatgacgagatgactaggcaggaagtggatgattggtgatgccaccaattaaaagacagggttcagtgaaaagatgcagtatccaggggaaaggactgtcttagtctgcttgtggtacatttgagatgacagtgagacattcatgtggaaagtccccaatgcaattagaaataggggtggggagaacagttgtgggggatcatggtcactattctcccacactcaattcaaatgccacctcccctgggaggtcctctattacctctgcaggctgagtatgcattcgttctctttacctctgcatcactgtctctttacctttgttttagcaaccttcctgctatcggattgacttctatgcatatctccaatccatcataaactatgaacttctcttaagcagggccagtacttgatccagggatgaattctggataccaaagagactgaaatatgaatgttaaacttagaagatgtcaaagcgggggaaatgtatgttcttattgaagatttgccttactgggatgtgagtttagagacgggaattctgacagagcaggaggaaggtttgagggaggaaagatttactgtaaaataatccagagactgaaaattgtatatgattgggtacaaaatcatgtctttattccatatgttgtattttatttcttagcatggagtcgcccaggaaatcattttacattatctgtttcatttcacttcccagattatccttgctctggaatgttgggtatggtgtctggacttatttctgactcccagatcacatcatccaaccaaggggacagaaactggatgcctgaaaacatccgcctggtaaccagtcgctctggctgggcacttccacccgcacctcattcctacatcaatgagtggctccaaatagacctgggggaggagaagatcgtgaggggcatcatcattcagggtgggaagcaccgagagaacaaggtgttcatgaggaagttcaagatcgggtacagcaacaacggctcggactggaagatgatcatggatgacagcaaacgcaaggcgaaggtgagggctggggactgggaggaggtcatcccttatgtccttgacttcaatcaagggcctctggcattctcccgaggaagggcttcttatttccttccagccatgacattagaggaggtgtgtgatggggtcagtaagacccttgattctaggaagacaggaatatggcatgaaaagtgatgtctgagataacatgcaaaagaattgcattgctggtcccattccctggctgtagggatggacagacagctcaacatgcagacaggagacggggaagcccaaggctgacagcagccatccagccagcgctcagaaccccttgcagataccactcagtcgtttgggtctgccctccccccatctcaaacctacccctagtttaagtgctttgtttcttttataaatttttattgtgggccaggctcagtggctcatgcctgtaatcccagcactttgggatgccgagtcgggcggattgtctgagctcaggagttcgagaccagactggacagcacggtgaaaccccatctctactaaaatacaaaaaattaacagggtgtggcagcgtgtgcctgtagtcctagctattctggaggctgaagcaggagaattgcttaaacccgggaggcagaggttgcagtgagctgagattgcaccactgctctctagcctgggtgacagagtgagattccgtctcaaaaaaaaaaaattaattgtgataaaatacatataatatacaatttcccatcttaacctttttagtgtgcagttcaacagtgttaagtatgtgtatattgtgcaaccaatctctagaactttctcatcttgcaaaactgaaactctacacccattaagcaacaactcccagtccccctgcccccagcctctggtgaccacctccactttctgtctgtgtgaattcaaccattttagggacctcatactgtatttgtctttttgtgattggcttatgtcacttaggataatgttttcaagggccatcagtgttatagcattgtgtcagaatttccatccttcgaaaggctggataatattcattgtgtgtttataccacactttgtttatccattcagccactgatggacacttgaattgctgtcacctttagctattgtgaataatgcttaagtatatttctttatgcgttgaaaccttttaagatgcagtaggctcttgataatccagtgaaaagaaaaggaaatctcaacacaaaaacattccattccaacatccaccaaaacccgtggtataatttttttcaaccaacaaatcaacctcagtcattatgttttacttagagtgatggctaaatttatttgcgaacatgcaacagcaacttggaaaggataccctggagtgtgctgggtggcccagaagctggtttaggattcaaatatggaccaacctacagacaactagcagtttaagttctgtgttcagtgtgggaattatattcagcgatggtatttctcacaccaatacaattggccttttggtcttagcctttccatccctgctttggccaggacctactcctcttgtgaaaaacagattttagcttattgaagggaatattaccctcactcccactctaagcaagtgtgggaacatggcttaatatagtgactcaagccagaggcattgcaggcagcaaagaagccaggctgtgctgccagctcccactccctccagatgtgaaggctccaaggaaacctccgtgtccccgacaggccaccggctaccactagagcagcgggccactggcagggctgggtgccatcagaaatatctgaatctctctcccatctctcccttccttaacttgtggtttctaaaatattttcagtgttatatttatctctctgtgcagctaccttttttcttgtgtccctttcattttccccttttgtgccttgtttggggggaagaaaaagtaaaataaacatcagaaactggagttccttctgagtggatctgttctgagaagcagtgagctctgactgcatcagaaagtgtgaatatgctgcaaatcaacaacttcctgctgctggcgacggcggcgtgtgctggtgtgacatgttcttcaacactagggctctgagagagaaagaaaacaagtcaccatatgcttttgataggatgcatcacatgcttccccgtctctatataattcatgcgtctgcaaccagatctaaagctatcactcttctgtagtaaatccagcactgaattccatgagaagccaatatacatctttcaactttcacaaaatactcaattcaagattggatgaacgtgttagggtttatttctaaaatatggttctatccatcattatcatcttcctatgatactgaaaactgtaaaagcttcttcgttgtttacatacagcctaatctatgattccttaacacacccttccactgaaataaaatctctaagacgaaaaaagaaatgggtaaaaatcttccattttagagcggcacatggtttttaatcatatcaagattttaaaaacatgctatatttaattttacaagtgaaggctacctcttaagatgccaagtaccttttatgtaaaagtaaaatgagcactctgttttgtgaaatccacagcacttggatggatttaaattttcaatgccctttcctcactctctaccccaaaaatagtgggtaatgggcaagctatatcagaatctttgaattaactagactttttagcaacagagagaaggtcgaaacactcaaagtcctcatcttctaaaacataattagcaacagaacacaaagaattcataagtaagtttattatatcagttagcctagttccatatgggttttcattgctaatattcttcccagctctgcactgacagcttttataatgtatttacattgtgttaattctttgctcaagttaaaatgaagagatgagcctgggattccatagatataaatgcttttctcctatgatctttggaggtatgttaacatagacagaacttgcatatgtagtaatggtattttcattataattagtatcctactgacaataacttaattgggcctcacaataatatgtgtcagagtctcaattactggcagcaattgcagttctataaaagtgcagaaccccgatagtgaatttactcttgataaaaaaaaaaaaagaaattttaattggaagaggcaggcctatattagcaatgcatttttaaactcctagaggcttttctgagttggaaaaggccaattaatttacttctagaactcagaaacctgctgattctgttgcaacctacccaatctgtcttcactgacatgcttccactgttttgttttgacatttccaccaccgaacaagcacatattaggctggtttatgatgtcttgacacagctactgggcatggctcccactcctgactggcatggcctggggccggccagccactccatctgatctaccaggtctactagcccaatttgcatcatattaaagacaaattaatgaaactaaatgtgtggccttgggcatagatgtttcttggaccgtggtgttttcacctattaaaatcaggagactgggctgtctcgaaggctcacgcctataatcccagcacttcaggaggccaaggcgggcatatcacctgaggtcaggagtttgagaccagcctggccaacatggtgaaaccccgtttctactgaaaatgcaaaaatcagccaggcatgttggtgggcacctgcaggcccagctagtctggaggctgaggcaagagaatcgcttgaacctaggaggtggaggttgcagtgagctgagatcgcaccactgcactccagccttggtgacagagcaagactccatctctaaaaaaataaataaataaatgaggagactggactagatggtttgtaagggcagaggcagcatcgtggtgtggttaagggcgccagttaaggccagctaggtttgagtcttggccctgccacttgctgtgtgtatggccatggggcaagtgatttgactactctgtgcctcagtttccttgtctgtaaaaggaccataatacagaatttacctcatggagaatttaccttcatttgtaaaattaaatgtaacatgtttttaaaatctctgaatagttaaaaaatatgtggccaggcatgggggttcacgcctataatcccagcactttgggaggccaaggcaggcagatcacttgaggtcaggagttcaagaccagcctggccaacgtggtgaaaccccatctctactaaaaatacaaaaattagccggacatattggtgtgcacctgcaatcccagctactcaggaggctgagacaggagaatcacttgagcccaagaggcacaggttgcagtgagtcaagatcatgccactgcactccagcctgggtgacagagcaaggctctgtctcaaaaaaaaaaaaaaaaaaaaaaaaaggctgctctaaaatggaccattttatcagttttctttttcaccttagagatttttttcagtggaaaggtgtgttaggaatcatagattaggttctatataaacaattgaggaacttttatggtttttcaatatcataggaagatgacaaaatgagttgttctgaggattaaatgagttaatagattttaagcagttagaacaatgccttactctatcaaacatcatgcaatgtttgatatttaaaaggacattccttatgatgagacaattttcttttcctcctccccctccgccttctcccatttggaatgggattaagaatgatgctggagaagaggatataaggaggctcatccatttcttgaaaaggaaaactggcctagtcattgctccatcttctcagaattccaccaaggattttgatcttcccgtgcatgtgaaaaggaaacaaagccagcagcagcactggcagtgggtggccaagctcctgaaaactgtcacagggacttcaagctaggaacacacttcaaaagaggtgccaactcatgccaggtgcagtggctcacacctgtaatcccagcacttggagaggccaatgcaggaggatcatttgcagccaggtgcttgagaccagcctgggcaacatcatgagaccctgtctccacaaaaaattagctcggcgtggtggcgcatgcctgtaatcccagcactttgggaggcagaggcaagcagatcacttgagaccctaagttcgagacaagcctgggcaacatggtgaaaccccaactctgcaaaaaatacaaaagttagctaggcatggtggcgggtgcctgtagtccaagctactcaggaggctgaggtgggaggatcactgagcccagggagggtaagactgaagtgaggtgcaatcacatcattgcactccaccctgggcgacagagtgagaccccatctcaaaaaataataataatgaataaataaataaatgccatctgtcacttcttagagaagctttaattgtttttttcctttctcgtttatgaaagagatgtaccacaaagtggtagaatgaagccaatttctctgccttattcagagtcctgaaggagggaagaaacagttgctaaaagggagctctgtttttttttttccttaatgccctgtgttttccatgcttcacagtcttttgagggcaacaacaactatgatacacctgagctgcggacttttccagctctctccacgcgattcatcaggatctaccccgagagagccactcatggcggactggggctcagaatggagctgctgggctgtgaagtggaaggtaattatgatctccagagttacttctcatgcgtttttaaatttcctcttccatgcatttatgcccctgatggtgcctttgcaaattgcctacccttttcccttgggaggccccttatctcggtgcctgcccatcagtgagactcaaagctctgacacaggtcacaaggcagcaccttcacagtcctacttttgtcttgggttgtttgcatgactctcctcggattatatgagattgtctctctttacttaaaaaaaaagataatttatagagttgaaattcatagaacataaatttcacctcttgaaggggaacaactcagtggcagttagcacatttacaattcagttgtaccaactaccctctttctagttccaaaatatttccatcactccaaagtaaaaccccttacccagaaagcaggcaacttccctcaacccctggcaaccacttttgccttttaaatattatttagaggtctgtgtctgatccagtttcggtccgcagtgtcgattatcagcacatagaaacagaaagcagcgtttgacagactaagacatcaagacattattctggatgaatatcttaggctgctgcagagaaacagaactttacatgagacaacgtgtctgaaagtagactgacattactgcctacacttagattattatatgacggtcatatcaagtacaaattcagtccacgcactgaccccatggctgcactctctttgaacatatgatgaatgaaatgaatgttttgagtgggttattgtaccgtttaatatatttatgcactagaatccccatctgccttagatttgggcataactgagtaacctacaccagtttttctatccccatagaggtcttgctccagcctagcttcaagaatgactattgtaggcatccagatgttaatcaaccgagcatatatgctcacagttgttttgaagaatgctttttaatgtcaccttcctgcaattttaaaattatttgtgtcttgagctaccaaatataattacattcctgagcacattaaataccataaaacttttcttatgaatgacagaatcttgagctatcaatcaccatacccctgaataattcatagctacttttcaatgtgtttatttaaaagcaggccattttctcctattcttcaccgtgtggttgtttccatatctgtagtcatgtcccaaacccctaaattatccaggcactatcaacacagaccaagaatgtccatgtgccagggctttggcaaaggatgccaagaaaaagaagagatgggcagactccactcactgcagatgcgttcgttcaattcacggagaaatgtggtcatctggaaaaggagtctgctccctggatgcgaatctgtagcctggattctggaaggcgatgctgatttaggaggtggagtgaatggagaattgaaaagacagcctggtggcagttttgaaagcacgcttgcaaaaattgtaatgagaacatgatgacagtgaaagagatctgacctaactgactccatcttgcttctaacctccaagctgtccttgttcattcctgggcataggccaaactaactttaggaggaacttatagtttaactttgaaacaaagacaatgacagctctttcccaaaacaaacccccttcctgcctggggactagattgccttcgcaagactaacaaattagccacaaaattggaaattatggtttagggggaaaaaaatgaaattatggtttaggggtcatgcagctggaggctgcaagactctgaacctccccaaattgcttctgggaataatgtcactgttgtaaaacctgagatcagtgcttcagatattttccagaccctgtacttgatggatcagctggcaccacccagatcgataaactggctcatcctgtcttgtgtccctcaccagaaactgactcagcacaagaggacacctttgactccctgtgatttcacctcagacctgaccaatgagcacctgccccttttcaacccctgctcaacaaattacccttcaaaacctaaaccccaagtaataatagaacccccatctcccatacagttgtctctgcatgaattaaactctttctctattgcaattcccctgtcttgataaatcggccttgtctaggcagcaggcaatgaggactcattgggaagttagagtttccactctctagtgtcatctctgtagtgaggtagaaatgatcggtgaagggatttgcctacagatgtttccaagcactcacaaaagtgaggacattgccctgggccgtatgtgaaacaaacatctggggaaagtaatgtcaaagctttttgatatgattggtgaaaaggaatgcttttcttctcccttcaatcagttaacaggcccttattaagtatctactgtgtgccttgttctaggggagacacctaagggaatgcaggagaaagatgcagtccactccagcctcccaggagtgtctgtcctattttgtgctagcacttacatttaagaaataaacaaccacaggccgggtgtggtggctcatgcctgtaatcccagcactttgggaggccaaggcgggcagatcacttgagctcaggagcttgagaccagcctggccaacatggtgaaatcctgtctctactaaaaatacaaaaattagctgggtgtgttggtgggcgcctgtaatcccagctactcgtgaggctgaggcaggagaatctcttgaatcagggaggcggaggttgcagtgagctgagatcatgccattgtactccagcctgggtgacaagagtgaaactccatctcaaaaaaagaaaaaagaaataaagaaccatagaagataatatattttcaaatagtaaaactggaacatacatatcatttgcttcctcctttttttttccgttgaatctagtgaatctagggactacctcgggccatttacaatgcggaactcccctttagaaacagcttgatgaatgcagaaaaatcagcaaaatgaatagagttttaaatacttaaaggtagcacattatctggagcaaggagagcttagggaagaaagacaactatctggcttgccagaggagatactactgtttcagcaagagcaataaatacaggccagaattcgggtgtatgtgttttgtaaaaaagtctggattgcaggcctgagtggcatgtatgttatttgcacttggtgacttcttagttattactggtgtgtatctttgggccgttgaagaagttgaaacttggctctgtttctccatgtgccgtaactctgcttggtgtttcagcaccattcagtgtcaaatttttactaagaaagcagcagttactgacacattcctactggcgagaagagaacaggccccagccaccaacatcttgtatggttctcagccatcacgagaactatccattatctcaagtcttgtaaagtgaaacgtaatgccaaaaactgtaaaatattaaacagattgcaaaaatgagtaacaggctaaaaaaaatatctgaacgaaatttaaaggacttcaaaagcagtctttgttgggaggccgaggcgggtggatcatgaggtcaggagatcgagaccatcctggctaacaaggtgaaaccccgtctctactaaaaatacaaaaaattagccgggcgcggtggcgggcgcctgtagtcccagctactcgggaggctgaggcaggagaatggcgtgaacccgggaagcagagcttgcagtgagccgagattgcgccactgcagtccgcagtccggcctgggcgacagagcgagactccgtctcaaaaaaaaaaaaaaaaaaaaaaaaaaaaagcagtctttgattaatattggatacctttcaactgcaaattcaaagatatgggaatacctgtgaacagtggaatgcagtcctatgagagttcatgtaaaatgaccccgggacatctgagacaacttctctcacacacctgccctggagagagggctcacagtttgagaagctacttacagagaaatggaatcactgtttttttagtttttttgtttttttttaaaaaaacactattgcactaaatgtgaacgttgactccctttggggaagaattataatataaacttagcaaacatagtcaatactaagaatataaaagaatttatgacaagtgagtgctctaacaccttgaaaatgaaagggaaaacgtttcaagcaaaatctctgtcttcaaagttctcaactccagggtcctgaataaataaccagtgagaattcaagagcttttcagaagaaggatgtttatgtagataacaatgtataaaatgctaaggcagacaactctactcggcagatacgaatcaaataccaaaacaaagcagcctctgctattatatattctgcagaatccaagtatatctagctcctgaaagagaggcaaaccatgcccctggtcttcttaccgcagattaaagttttctgcataagcgttagcagatccaacagccagaggcttgagaatacatttccaaggtgtgagataataatccttggatcttgtttcagcccctacagctggaccgaccactcccaacgggaacttggtggatgaatgtgatgacgaccaggccaactgccacagtggaacaggtgatgacttccagctcacaggtgcagaaaccatcttcatcccattgctgtaccatttcagttcatgtcttagttgggaccagctaacgcctgtgtgtgtgcttgtaactccgcatggcagagagctgcccaggaatagaagctgccttgccagaacacgtgcatcttcatttcctcatgtcatctggatagatgagttgttcttaatagccacaaccatttgtaacaataatttgagccatttcgagagccaaaggctaggattatcttaattgaataagaatttccccatggctaaatgtactaaaccgatccttattttcattattttcagacccccccccaataacacgtgcaccacccctacgtaaccacacacttcagaatgtttattttcattttctaatgaggacaagtttttttgagtggatcctttatccaacaaatggataaagttaggcttatatttgaagtgcggcttttaagttgggatttggtaaatcattgtacattaacatttacaaaggcagaattagctgctatttcacatcaccaccgaccagcaaatgcatcagagatgttgtgtgccaaatgtctcactaattaatctagagtattactctctaatctcctaaaaccctaaaagctaggaaatgaccttctcttccacttggaatggcagaggaaatattaggcaagtggagaaatgggattataccatttggaaattggccaaggcactagggttttcaccctgtggttgcaaaaggtatcgtgggacttttactgctccctgggtcaaaacgcagtttcaatagcatctgactctcatttgagattaaacatgagcttttgaatgcaggtctgcatttttacccagaagggactcggagagcccacataattaatttccatgggcaaaactgaaggcgttaccatgtaacttcataataaagccatgttattggctaatgcattcgtacaaaatctggaaggaagtgtcctagagtacatttccaattatttcaaaagctctcctctgaaggagtgagagggctctgcactctaagatggaataaagagtaaaagaaagaaaaaaaaattgaaaatctgtcccagaaatttagtactgtgaactgagtttacatttaaatcccacctcctaaagctgtctctctccaaatttccaggataatcatttacattcatatggccaataaatgtcacattgctatgagcttttgaatgcaaatcttgtatacaagcagccacaagccacaaaacttagattaattaatgcagagacattttctgtgtaacatgtcaagttcaagttgaaaactcaaccactgatataaaaaacagagtactattccatgaaccaagtcctctggaagcttcccggggttgcctgtaaacactctgccacaaacctcaggctttttacagaccccgtcacacatccatagtgaaatttctcataaaaaaggaatgattgcaggatcccagtgtgccctttcaattgccctcttgtggaaggggttcttttcttcataaaccctaaagtggtcagttaatattgattagaaacaaagcctcagatttactcctcatatcagaacaaccagccttctcatttttgcattagttcatgactgaatcaattgaaactgaaggctttgaatgaaatagggcgagtatgttagcctggagcaaattgtgtatggcagcgagttacaaaccacagaaaatgggtcatttatagtggaaacactgacaacctttcaaaactataaggttttgctttacctacagtgtttcaattatttctttggtagatagaagaaagttcattctgattttttctttttacatattagcatggtgaaaaaaagagttattcccagatcagcacgtttgtctcaataattctataaatactctcatatactaagaaccgctgaggatgttgataaggcctgccccacacctccatcaagaagaagccattttggaagacattctcctgcttcatattcattattgcaagaaggcagtctttttctttttaaaacatattttactttacaaaaccatttgctattcttttctgaaaatggatgtgctcacatgccattgtttgcaagaggcaaaaacctcacctaacccagacacctttttatatggaaactacacatctcctatgctcacaagcaattttgcatcctttttgctaattctggcataggttttgctgtcaggactacaaacgtggatgtttagtgtgatgaaaccaaaccaagagcgttattgctttaaccctaataggtagaacatggaaattgggatcaatgctgtctttaggggttgtctgttccttagcacaggtggtgtggatttaatttcttctcctggggtgacctacttgtatctagaggggagaaatattgtaatgaaatgctcgttacttacaaaccacaccaaattccaggtgtactgtaccaaatgcatggaaatgagtagaatgtgctctcccagacctgctagccaaggtgaaaatgcttccctgaaattactcatttgcaaatgcctttgaagtcattagataatacacttggcctcaaaggcaccaggcagccaaattttacgttggagctgtgtgtacccaaccgtggaatttgcctcccaaactatagcaaaactgataatgcatatcggttttaaaaagcgaattttcaccttgaatctttctcctataagaccactgggaacagaacgctaatgtatcctggcctccctccaattctgccattatagattcaccttcttaacccataatacatataattccttcttcctagtgcctgccttattgaggccatgcacacatgtgaccactcatccagcatatttgctgggagaactgaggtaccatgacttggtgctgcagttgattagcctagaaatcttaagaccattccaagagcacgattttatggccctctgattcatgctatggatatgtaacatgatttctgatctgtgggagctgccagataggcctgtcccaaataaagatcgtcacaaatctttactgaatgatattattgggaagtgcacaattatggcaccctgtaaccacctccagaactttccatggtaggcatgggcccaccccattcccttaccctgaattggttcaatactgtatctggacataacaggttacttccaaccataatctgcatcgtggatagacataaggaaaaacagctttctcaaccacctacgtaataacagcaaaccactgtttcccaaactcagtgggttaaaagactcacctgaaaagctttcaaaaatacagattttggctgggcatggtggctcacacctgtaacaccagcactttgggaggccaaagcgagaagatcacttgaggtcagaagtttgagaccagcctgggccagacagtgagatccctgtctccgccaaaaaaaaaaaaaaaaaaaaaaaaaaaaaaaatatatatatatatatatatatagaaaacagccaggcatggtggcgcacacctgtagtcctggctactcaggaggctgaagtggaaggatcccttgagcccagaagtttgaggccacagtgagccatgatggcgccactgcactccagcctgggtgacagcaagactctgtctcaaaaaaatacagatttcaaagcctcacacctagagactccaattctcatttaggtctggagaggacaggtggatgggagactgcaatttcaacaagcattctggtgattcttatggttgggcaagtttaagaacactactttaaaacagaagtataatgatgaacagtgggaaatgggtgagtaaagaggtggaagagagggtaaagctaagtcttaatagataaggttacagcctgtcccctgaccagtgagatgcagtaggcctgcactaattggaagttcacagcactcagggtgttatttgttcagtcttccaattccttgggactatgaaatatttctcctgttccccttttcctgctgcttcctgcagcttctccaaaccacatacagggcagggtatttgtccttgagaaaagtaaacagctccagtagccaaacagaggaggaaccatagcatcttactttaaaccctcagttttctagtttttaaaatagattgtggggactagccttgcaacttccctaaaggcacacacctgaaaccttggaaaacgatttgaagcttagaggttgaggtcaagtttaatacccaagtcaccgagaaggtggctttgctttttcagaggcctttgcttttcactgttgcaattgtgtgccatgcgtcgtctgggaatcagtgagtgcccgtggagtgaagtcccaatttctgggtgccttctggatgctttgtaaagaaaggtgttaggatacgttgtctacttgaaaattgcaggctgggcacagtggctcatacctgtaatcctagcactttgggaggctgaggtggatggatcacttggggtcaggagtttgagaccagcctggccaatatggtgaaaccctgtctctactaaaaatacaaaaattacctgggcatggtagtgcacgcctgtaatcccagctactcgggagtctgaggcaggagaatcgcttgaacctgggaggcggaggttgtagtgagccgagattgtgccactgcattccagcctgggcaacagagtgagactccatctcaaaaaaaaaaaaaaatttaaaaatttaaaaaaaagaaaattgctaagagattagattttaagtgttctcaccaaaaaaaaaaaaaagcctaaaataggtttatgaagtaatgcatatgtgaattagcttgatttagccattccactaagtgtaccaaaacatcacgttgtatgccataaatatatacaacttccatttgttaatttagacaattattttatttataaatttttaaaagaaatgcgttaggtaaaaaaaaaaaataatggtttatttgaatttgatattgtggtgagcaaaattgaagggaaacaattgctatcattgaaattaaaaggatttttctatggaaaatatttgcctctgatagacatttgtaagcatacatttttctcctgcatattcgctactgttttcttatttttgcatgttcctgtttttgtttttcaggtggcaccactgtgctggccacagaaaagcccacggtcatagacagcaccatacaatcaggtatcaaataaaatacgaaatgtgacagattccatgtacctctcttctctccgcggctgcgctcctcgctttcagtttctctgaaagtcctagaaggagagatgccacacagcatctggtctccaagcatgagccataaatattgctttcctttcatccacatgtatatgcagcagggagtgagatttccttctccatcagtaattgccaaatggtgacaatcccagctctccactgaaggaacggagtaacatactttgtttaaacgcagcacatctaggacatggattgtgtttgcaaactacaggagaaggaaatctcacaggcagcacagcccgactatttattttcatcccaatcctgcaaaacccaggcaggcaaagtttgtcagttttgcctgccatggagttggcagttttacaacagtgtttccagtgggcgtgccacaaaacggggttcaggaaaccagagtttataattgtgcacagagagaagcacacccttgggaacagcacctcctcatccttttattaatagaaaagcgtaacgacttttaaagccctcggtttgctgtcgatcaggggccagtcacggttaaacggtggccttcctctcactggcctttgtgttttgttagtatcctgtgaaattcttcccggcagacgtacatgaagggaaacagtcagtataagcaatcagaggttttaaatactttaaagttaatcattagactaaggtgaacaggtcagttttccagctttctcccatttcctctattgaagctcactcagtcttggcttctgcagtcatttattaatggggcgtgtggtgtatatcaatgtttcctctatggtatgacactacccagctaggcagaaagtagaaagggccgccctaattagtatgcttccttaaaggacgctgtcactgttgacctgattaaactgcaaaacaaacttctctttggtcaaacttaacccccagctgccctgtagcatgttcaggttgacaaaattcctgctaccacacagcccagacaccctctacaaaaccaagagatgaaacagaagagtcactgcctaaattcagaaaatggtgtcgtcctacacacatcttaagttgtaaaatgtggctttcaaagactgcgcaggcacctcccatagctgaaggtatctcatgaaaaaagccgtgcctttccttttctttgtacctttcctgaaagttctcagccctcaggaagattttctgtggatgaagggtagtgaccaccagttggttctctatgtcctttctgggatagggaagaggggtgaggtgaacaaatgaagttctgatcatataacaaacattttagctgttgttgcagtttcttctcttaccagagaggtaattaaagccactatgaagtcgccagctaatttgtttcatctcatctctcttctccttgactatgaaagggggtagggatcgttaaaaaaaataaaagtgaacaacagctgtgtagaaaatggaaagttctatcagattccaaatctaggtaatcttccctgaatgttgaaggtcaatattgtcagagcaggagcggttttgttaacacatttgatttgtgcacaatctcaaggtcactcaagggatggcttctcagaggggccagtcggtcctgtcacagagtctactgtggtcagagggcaggtatgcaaattgcaaacagtaggacccgttgctatcaccatctgaacaagttcaatccaaaccacgcgggtctactgatcaggggtggtcaggtccggtttgcatttcacagtcagtgcagagttcttttcaaattgacttgctttcctgtttctccattgtctgagtcatgaatctggactccaagtgctctgtttgtgggtaatgggctgtctgaccttcctggaaggacttctgttgattgtcaccttctggctaagtcaatgcccagaatattgcatggggacttgagcatgcttcaagccaggggtcaggtctaactctgaagagttgacccagtggcctgagtcacctgatactttgatccacactgttctgcaggctccagattcttcaagcatcatcacaagcagcagtcaatgagacctcaaaaccttcatcataattccattttgctattatagactcaactcagagtcttactatttcatcttgctgattctcatcaatataataaactccatgggcatataatatttatatacttttatgtaatcagatgcataaaagctggttaatgctctgccagcaagtgatgggatccttacatttttaatctagctctctctggcgagagctctaaccctctgaggctcctccagcattcctgcagcagttcggagtatattcatcacctacgattgtatgggcctgagcacctctgcttgtttagactgaaagactagtctatgaacaagtgagttaaactgctctatagaagtttggaataccagatataaaaattaaatccttatgcatacatatggtgctaatgatccaacttcaggcaagatgggttgggcaagcacagctggtacttgctctcagaggctgtaaatttgttttaagttcagaatattgtttcctgctatttttaagagtcaagaagggatttagctggattacccccattgaatttaatgagagttgtgtgccccgccagggcttgggtaatattttgaaaacgtaaacgtcagtagtcctatatgtttgtttcattcattaatttgcttttttctctccttttctctctccctttctcctttcctctgtccttctctctttcttttccctttctataaatgtttatgggtggtttgtgtgtttgtctttctagccaggctggaagtttccacattgaacctctcactccataaccctccccaacaaaaggcattgatctaaaaacatatcctttaaataaccaaattgccacaagttacatgatcaagacaagaagataaaagagcagtaaaatacaaaaacttagagcggttcacctggttaaatgtacaggatggggaaggacattggaaggtaaaggcagactgtcattctctgaagcgagaagtgcctgaaacattttttcaggcaaagcggttccatgtcctggtcatttcaaaaatatccaagttcctacattttatggtatcatcagaatatgaagagccaaaagaatggatgatgtcattttctgttctataaacaataaatgtaatgtattaacaaagtaaatacaggcagaactgtgtgtgctggggtggctttctttatcctgaatgtgcatgttttataaagtacatttaaggagaaaaatcaaaaccacacacacattaacatgttccaatattaacattttctaacatgagattatgcaacagtacatttcagggtcatgggcgttggcatccaaggttgctcaatcattcagtcaccgttcagttgactgtacttcatctacataattcaatcttgctgcggaaaagagtggtaaattttggagagggtttcccatgccttaagaagtcctatttcatggctatgatagactagacatgaaatatatctctccgatgacactacagctgtgaaatatagcctgtttgcactaaatgaaagtactcacattttacacatcacatagcttactagtttactttcccaaactggctctgtctaccctttgggaggtcacattatcattgggagaatccaaactgctccatttggacagtttttatggtggattccttccaaaatttgacattagctctagaaaagggttccttataaactaaaaatgcaaagtaaatcattcttatctattcaataaatcttcccattaaaattcctcctgccattgggggaggggccatggagacaaggctcagagcagaaggcgagatactttgttaataaacacaagcaagttaaagaagctcaaaatgagataaggtcttggcctgaccctaatacagcatctaataccagacttcccttattgttcatagggattcttttgaggcttatttttaagttcaacggtccagatgccccaggcgccttcctgtttgtttcaatgctgccacctcgtggactgcctaaagtcagtgacaagcctaaaggcccttcgtcactggagaaaacagctgcatctgcgggcttcgttctttataggaggacgaaaggagggggcagaagcccgagaatttcatctttagaattttttttattgttagcttatgtttaccaaaacaacagtcatacttggaataagtagcaatgatttcatttttcccatacttaaaagttaagctcctttcaaaaagaggctgtgtaaaatgtcaggctgtgggttttaaaaacaccatagtccaacagcaccttgtagggcacacacaaggcaagtcattcccgtgaattcattcacgctgtcttttcagattcctaaggaagccttttgaacattaaaaaaaagaaaagagaagtaaaaacgggtagctattgaaatgggctttggatttagatgaccttacattgaggttttaagccgggtgaacaatttatatgtaaatttagaaattaaaaaagcagaaatttatacttaaattaatcgaccttatagaaggcatggaagaaaaaaaaataatcctaaaatgcttaagagattctaaccctgacattaaagacctgaagcatgaactggtgaggtggaaatagagaaaacctcctgggtgaggcatttcgccaagttactttccacttttgaggcttcatgggtcaatctctaattaagattcttttcattggtgggtatcaacttatatgatttatcctcaagaacagaatggctttcatattaaatactgtggaaatggggagagtgcagcaaatgtaatacacgtgctttagaaaatagccttcctggagattttatgtaaacccaatttgacaggcagtccataatccttttaaagctggatttttaaagaaattactaaatgtggttttgcaaacattttgacatctccatgcatcttttggtttcttggtaatcctggctttcctggaattttcaaacagacataaagttgtataaatcgtgctttccatgagtgaaccaagggcctttgtgaccctaaatgatcaaatttgcctttctttgcttgtctcttatttttacttcccacccactgaagagtttccaacatatggttttaactgtgaatttggctggggctctcacaagaccttctgccactgggaacatgacaatcacgtgcagctcaagtggagtgtgttgaccagcaagacgggacccattcaggatcacacaggtatcacagagttcacttcggctgcatggctttgcagattctctttgattccgaggctgtgttactgggagggtttctaatgtctgtgaatttagggcgggtaggaattactacaggcgttcacatgtgctattattttctagaattaacaatgtctctttccctagtagcgagaagcatagggcaaatcatagtaatgccccttgaagttggccactgattggcctccttgaaaacagcaaattgggcaaggatctatgaattagcattcatcttatcctttttttttttttttttttttttgaaatggagtctcacactgttgcccgggctggaatgcagtggcactagctccactcactgcaacctccgcctcctggcttcacacgattctcttgcctcagcctcccaagtacctgggattacaggcatacaccaccacacccagctaattttttgtatttttagtagagacgggatttcaccacattggccgggctggtctcgaactcctgaccttgtgatccacccacctcagcttcccaaagtgctgggattataggtgtgaggcaccgcaactagcctcatcttatactttttctgaacttcttattttgggcaatttcaaacatattcacaaatggaaaagaaatagtagaatgaattctctatgtgcacgaccctgcttcaacaattatcagatcataggaaacttaatttatgtctgtcatccctgactctgaattattttcaaacaagtccaagcatatattatgtcccctcgtttattttacaactaaagaaacaattcacaatgcttgctctctcccgacccttgaaggggaggtggggaaagacggtgtggaattcttattcactggggaaagattgaaagtgtagtgtatttcctttgagcaggtagaaacctcaccatgccctagatcacaaccctcccaccacctcctgccttactttcttcctaagattaattggtgggggaggaatgggttgggggacagaaaaagctggcagcttctccagtgaactctattatctgcccccttcctgctacccacctagtcatttcactgcccaacttgaagtacagtataaaggaccagcagactggacgtggtggctcacacctgtaatcccagcactttgggaggccagaacaggagaatcagttgagttagagagttagagaccagcctgggcaacatagcaagatactgacactacaaaataaattttttttttaaaatcagccaggcataagggcgcacacttgtagtcccagctactcagagtctgttttaggatcctttgagcctaggagttcaaggctgcagtgacctatgatcacaccattgcactccagcctgggtgacagaattagaacctgtctctaaagagaaaaaaataaaaattaaaaataaagaaataaccagccatgtctggcccaacacacatgcacacacacacacatacacacacacacatatacacactcacaacaaacgcccaatccatgaacttctgcacccactcagaaatacttacagagcactgcttgctcaagtagtggcttcccaaaaggtaccccaggggggcatttgctgatgctaggaaatctcattaaattctccccatcttggctctttgggtgagtgagtcagtggactgaaggctgggccaagggtacttcatgcctttcccattttgtggttcacttttctcccagtgaatataaccattaaataggttgaataggcctccttccaccacagccacctccttgcctaatgagaatgacaaggaaattggataaaattggactccttcaaatctgagacactttcaattgaatcttaagacaggcagttttagaaaacttaaaatactttgactgtaaatggcactgtacatataaatggcatcaaattaactaaatgcaattagccaaaatgaaggcagtaatggtggaaaaattgatgcaaagtgaagcaaaatggctcagtaggatctgacattcaaaggaggttaaaagctatgttagccagagacaaaagctaaaaggcttgcagaagtaaagtgctaattgagaaaatgaagacagagttcctgacccagaactgtgataaaacccttgaaagggaaaatatcagtgctttatgtgttagagtatcagagaaggagagcttgtcgtagattaacagctgagaagtgcgattccttcagaagggtttgactcttttgttctctcagccacccagatttacttggcagttgtgccaggtcagctccgactagaaagagcccctgcagttctagaaacacaatcatttgtgtagagagatgggtgagcccgacatctgaaaggcaggaactacttgttaacgggaaaaagatccagatgaaaagagcccttcacgaagctcccgcgcatagactgacattagagagtagatggtgctttttttataatattatttggtgaaactttgcaagccagacattgggttgtttaaaaagaaaatgaacactagctaggtaaaatatcctgctgcttatcgaaaggcatcccatttgcttggttttctgcatttgacctcaaagaatggaactaggtacctcctttcagaggattcctgaagtctggcatctctccctggttcagtgaacaagtggtatttgagaagctctgttacagggcagatgctgacttgggcactggaaatacacgtgtaaaggaagaggtccctacgcttgaggaactcgcagtctgatcatggttgggaagcaaccacagtgcagttcagtgagggcttccaatggcagaggccagtgacaatggaccatgtaaaagatgacggaagaggggtcaaggaaagcagccctgtctcagacaccggctgagctaggcttattttactggctcatgtttggtgtgctttgcacaggtttttgtatgggaagcagttagatagaggcagagtgtgcatgactttgggaactacctccttgcctaatgagattgacaaggaaattgatgaaattggattccttccattttcactgagtagagcagaagtttgtggatcgggtgtttattgtgagtgagtgtgtgtgtgtgtgtgtttggcaggacactgctggttctttatactataccttaagttggtgatgcagtgaccaggaggaaaacaggatgggggtggataaaaggtccattggaggggctgccagcgctccctctttgtgaagaagtgtggataggctgcaggcagtgagcagcctctgaagaattctaagcagaggagcaacacgagcagttttaatttatatatatatatatatatatatatatttaagacagggtctctgttgcctaggttggagtgcagtggtgtgatcttggctcactgcatcctccacctcccaggttcaagcgattctcctgtctcagcctcctaagtagctgtagtcccagctacttaggactacagctatgtaggagctactacagatgcccgccaccacgcccggctaatttttgtatttttggtagagacatggttttgtcatgttggccaggctggtctcggactcctgacctcaggtgattcagccacctcggcttcccaaagtgctgggattacaggcgtggaccaccgcgcccggccacacgagcatatttaaagaccacagtgtgagaaggcagggaccataagaacttcctcaggcagaggattcttgaaatctggcatctctcctactgcactgaacaggcatcatttgagaagccctgttacatggcaggtgctgtgttgggcactggaaatacaggtatgaaggagggggtctctgtgcttgaggaacttactgtctagttgtggatgggaagtgattatggtgcagttgagtgaggatgtcctatgggagagcatccctctacctacgtccacttctctccttctttctaacacccattctctgactagcctcaataaactttgagcaatgagctcaataagtgggattaagacatggcagcagcattgccaatttcagtcttttttccgtaagattgaggggacagaggcacgatgggtgtatttttttcccatcgtggtggattcatcacagtgaaatggcaccatcccacagacaagtaatcacatcttgataaattagtgggcaaaacaaatcctaagtgtgaatggatcagctcagtcacagaggacacctgcaaggtcagagagcgagagggacattcatcctgcagtatcaaacctactgctagagctgccatttgtgaacacccttcctttatgattccacccgttggtttgaagaagggcgggctctcacataagcaaccaggtaaggaaaggaagctgcccatgaacacgtccacatccacctggacactgttgacacaggcaagcggaaaggagtatgtgcccacgtgtgcacagtgagaaagcaccttgcaaacacacaagtctcttgggcaacaaacacaacctcttgctgcccactgaggcccgagcagcagattcacacttaatcaggtgaggtgttagagaagatgatttctatttgcagagccaacagtgaaacatgagctgtgttgaccaggtggtggcaggaggaaatgttcccagtgggggtcattaaaagcgaagccaagagaaagtcctcgcagttcagcaagtgtctaagttgccaaaatggcacgttctaatgaacctcaacaaggcaaccttgcctctccttgagccagaagcccacatcaaatagaagcagggctcacagtagagattcaagctctcaggtgtgtttaaggaattcgaaaaccatgaaaacaaactacgggaaaaataatctgaacttgaaaagtataaaaaaaaagattactacattattaggaaaaactacaggtttatgattatcaagcagtcatagtgacagaaatttcattaatcagaagtcctgctgctcaaatgataaataaaaatacatctcaatgatttcatttaatgcatgtgttcacatgggtgccgcagtgtgatcttaaagttgcataaaaacagggtttcttgggcccagcgtggtggatcatgcctgtaatcccagcattttgggaggccaaggtgggaggattgcttgaggccaggagtttgagactagcctgggcaacatagcaagattctatctctacttaaaaaaaaaaattaatctttttaagaactagctgagcatggtggcatgggcccgtagtcatagctactcagaatgctgaggcaggatgatcacttgaaccaaggagtttgaggctgcaatgagctatgatcacaccactgcatcccaacctgggcaacaggagtgtctaacataataaataaataaataaataaggtttctctaagagccaggagttttcagtccagtctatgcacagactttgctttcagtttgcttgtgatggtgcaaatgccagcttgaggcatagcatgtgtccatatgaaaatgcattccattataagtagtatcctaattagtgccactcagccttcccctaatcaaatgtccattttgcaagagctgagagcagggccttaggtgcccatgaggtccccaagtgtgcacacttatccctttccactacgtatttgggttcttggtgctcagcgcaggaagcttttgattagtgagacttgaaagaagagagataaaagtgtggtaatcctggccactctccctaacacagttctttgtcacagcaggagatggcaacttcatctattcccaagctgacgaaaatcagaagggcaaagtggctcgcctggtgagccctgtggtttattcccagaactctgcccactgcatgaccttctggtatcacatgtctgggtcccacgtcggcacactcagggtcaaactgcgctaccagaagccagaggagtacgatcagctggtctggatggccattggacaccaaggtgaccactggaaggaagggcgtgtcttgctccacaagtctctgaaactttatcaggtatgacctcttcccaaggctggggagggcagtggctgcaggaatgctgagatgatatgttggaggctgtgcaaatgagacatgggaattattccgaaattatttccagtgtttcccaaccctgagatattgctgcaatgataaccaccttaatagcagatttcacagtctcctagattgcaggaatagaaccaatttgctgagaaggaacacaaagggcttccgtgtcatctatttctgggctttcacaatgtatcattccttttgtttgctgctttctcccgttttaaagtttgtattataagaagagagtgtaaggagaaggtgcataccatcaccaggcagctaatgtggattgatgagtgaagtctgtgttacgctgaatctgatgaatttaatttatgtgccgtagctggagctgaacaagcatttgtaaacactgccatgtgagatgagcatttcaatactgtgaaaatgatcttattttgttaggtgattttcgagggcgaaatcggaaaaggaaaccttggtgggattgctgtggatgacattagtattaataaccacatttcacaagaagattgtgcaagtaagtatgagctgctgtagaaaccaatggagtgcttgcccagggcaagactcttgccaatatgatggtctttgttttgctcatttctacctagaatttcggtgtggcctctcggcacatcataggaaatgcgtattctggtgcaacagggcatacaatcagcccaatttacctgtgtctgccccgtcacctaccctaggtccttcataatggctgcttgatacctataaaactccacaaataatgcagaatccaaagatgatagctaagaagacccagcttacaagctatagatgccataccgaaacattttgatgaacagtggaaagtcagacatctggataattccaaatatctgggtgtataaacaaaacagcaggcctctgaaaactttgatcagaataagtttaattaagaatgcattgttaatgaaccatagaagccataattctttgctttatcacaagtagatgtttctgacttttaaaatatctgaaatgacttaaaggacttcaatgagattcagagacttggcctagtatttcagagttggtctttatgggtcttgtactaggtggatgtaagacatagaaaaccaattcatattccctagttcttgatatataattacaaatagcattactaatggcagtgtaatagcacagtaattagtcttcagctccatttgctacattgaaacttttgttatacatcattatataataggatgttaattataacaaaatgggataagcctattgggccaatttaagacaaaggaggtctgttggctgtaatgggggttttggtcacttcagcaacttacaaagcttttattatataatatattgaatatatataatccctaaagcggcaataatttgataggatccatcgaagaaattgggcaaaaagaaaggagcaatgaataaaggcttgcttcttcatactattaaagggaatctgcttagtgctgcactatttagcaaatcttcacaagaatgataaggcttaatagtttagttgcaactcctttacaaattacccacatccatatctacactgctgtaaaaatgtgtatttcatgtagtaacacagtgtctgtgatttcttcacttctccattccaaagtgagagtgatgatggtgatgttttgggatgtgagaacaaactccacagactaaaacaaagaaacgaaattaaattcagttcaacaagttctaacgaaattcaattcggttcaacaagttctaactgactacataccatatgcaaagcagcatgcggatgctccagtgaaagtacatggctgagccgggtgcagtggctcacgtctgtcatcccagcactttgggaggccgaggcaggaggatcatttgagatcaggagtttaggaccagcctggccaacatggcaaaaccccatctctactaaaaaatacaaaaattagctgggcgtggtggcacgcagctgtagtaatcccagctactcggaaggctgaggcaggagaattgcttgaacccaggaggcggaagttgcagtgagccaaggtcataccattgcactccagcctaggccacagagcaagaccccatttcaaaaaaaagaaaaaagaaggaaggaaggaagggagaaaagaaaagaaagcacatagttgagacaattctatgggactttttcttttcttgtgatttgtccatttagctgtagttgctgccagacattgtagtgggaaattcacaactacggctccattaaaccactttgtttatttgtttatgctgctaccaataaaaatatgtgtaagacaattgtacaatgattcatcaaatatgcatccttgaacatctgggtgtggatgctatgagattatcaactatttattaatctttcattcattcatacatagaacaaatatctattaaagcacctatgatgtgctagacactgttgtaaatgctggaatacagcagtggacaaagcactcaaaaattcctgctctgtacttagtaccacaggaatactggaactctacttcttcaatagctattttatgtatttatctatttttgtaatacacagggcacagtctcttgcctcaaagagttggcatactattcgagaagccaaactaacgcacactaaatttaggaagcagttatctacaaactataggatggtcaccatatgtacgaatctacttcagtagaacctatattcaccagatttttttccacatttcagatgccaaaaccatgtctcttcccccttctcttctttttttttttttttaaatttgttgttgttgtttttgcttttttgagacaggctcttgcttccgtcacccagggtggagtgcagtggcaccatcatggctcactgtaaactccatctcctgggcacaagctctccttccgcctcagcctcctaagcagctggaaagctaatttttttatttttgtagagatgggatctcactatgttgcccaggctggtcctaaactcctagcctaatgtggttctcctgccttgccctctcaaagtgctggaattataggcacgagccagcatacccagcccacccttgtctcctaaaacaacagattctgctagcagcagtgctacctggatttagatatggcaccttaaaggcagtgttgtgatgtcacattaccaatttcccggtcatttaacattgcctctttattgatctgtttggtgatttctgattgaactaaaaaatccaaaaggagcccagtagacacgtgtgtgtgtgtgtgtgtgtgtgtgtgtgcatgtacctaaaggtttgtgtagtttggtgcattatattttgatggcagttcaaatatctctttcaattttgtttgacttgtcagaaccagcagacctggataaaaagaacccagaaattaaaattgatgaaacaggtaaatttgtcttgctgaccaatttttaaaaaattttactatggctttcattgtgtttatgaagaaactttgtggaactctaatacactggtatgtcaaaaagttcaaataaaaaacatctatgcccatggccctgggttggtgctgtggatcggattgtgctcacagagtacccacttccgagctgcccataagacttggggagcctcggtgacgggtcctgcttgtacacctggttgagcctgggaagtgtgctcaccctggcccttccctgcccagtctagaggtggaacataaaggataatcagctcaaacacactcagtttatcactacaaagacagaaaattagtgaagactatttccatacacagttatttgaaaccaaccgaaattcttctgtttgttgatatccagctaggatctttaagagaccagagcccaatttctgagataatccattgtgtttgattcatcttttcccatcttcctctactagaaccttggttttgtgatgatgatgatgatgataagaaggatttattgaagagttagtatgttctgagcactttacttacctgatctttttcttttctttttttcttgagacagagtctgtctctgtcacccaggcttggagtgcagtggcgtgatctcagctcactgcagcctccacctgccaggttcaagcgattttcctgcctcaaccttccgagcagactacaggcccacaccaccacactcaacttatttttttgtcttttgtaaggtggagtttcaccatgttgcccaggctggtcttgaattccttagcttaagcaattccctggcctcagcctcctaaagtgctgggattacaggcgtgagccactgcacccgtcctacataccttatcttatttaatcctcacagcagctctaggggttgtatttgtccccattttacagatagtgagactgaaacttaagtagcatagctaattaggtggtagcctcacactttagcctgatgaactataaatgtgtgtttttgctgaacgctgctttgtgatcaaatgcaagacctttgatcagagttaggccttgcctggtattagtctattcccagaagtttccagatctcccagccagcattgtgggctgttggacacttgctccaccatcactcacagctgctgtgtggatggtgctgcacccttatcatcaatgcatgtcagcatctgttgcccttagaaatgggatcctactctatggccagccgtggacttcatagagacaaataaatattgcaccttgctgttagtaatatgaacacattaccaagtccacacagagatgtaaactttattagaggttgtttcaaaacaatatttcatcaagggagagagtattaatatgccccaaggcttgttttctcttggttagggatttgcatctcatatttttagttttctttgattggaatctttgttgatcagaacaccattaagtaaaccccaggcatattgtgcgttaacattttcatcccgtttctagtaccaggtaattaggctcaaagctcccatgttaacaatttctcctgttccactccaaagaaaacaagtccccagtgactgagctgcagagcagtgcaactgtctccagttaaactaccagggctgcaaagatgctgattattagtaaatgtcttctatttggcatgacagacatggtttctcgatttgagccacactctgtttacatgtcagcagcaagcattctcttgttctaaaaaatcactccttctttactgaaactactgtagactttgggcaaaattcgtttcacttgaagattttccatatgggagaacaaacacatgcataaaccatgccagatcctggaaacagcaccacgtagaagggcagccatgaaggtttttcttgtgcctgttttggggttaggtacatgcactgggaatggtaaaatccccttgctagactaatgtgtgactaagcattttgcaaaacttaatgatcacctatctagccaaggactgtaaacacagattacaatctaggacagatggggctgcatgaaatctgagttagatgagcaaggaacctcccagttgatccagaatgggttgtttccacgtgctaagcagtctgtcagaagccccagcgcccactcccctctaccacctcccacacttctgttcccaacaatgagtcagatatgacaggcaaaactggggtgtgtgatttgctcctgtttcgttcctttctatttttctgtctgctttcatctggtctgttggcggtgctcacggagacaatattgtttttttccatagggagcacgccaggatacgaaggtgaaggagaaggtgacaagaacatctccaggaagccaggcaatgtgttgaagaccttagaccccatcctcatcaccatcatagccatgagtgccctgggggtcctcctgggggctgtctgtggggtcgtgctgtactgtgcctgttggcataatgggatgtcagaaagaaacttgtctgccctggagaactataactttgaacttgtggatggtgtgaagttgaaaaaagacaaactgaatacacagagtacttattcggaggcatgaaggcagacagagatgaaaagacagtcaaaggacggaagtggaaggacgggagtgagctggggagctgttgatctttcactatacaggctgggaagtgtgttgatgaccactgagccaggcttttctcaggagcttcaatgagtatggccgacagacatggacaaggagctgtgttcaccatcggactcatgtgcagtcagcttttttcctgttggtttcatttgaataatcagatgctggtgttgagaccaagtatgattgacataatcattcatttcgacccctcctgcccctctctctctctctcctctcccctttgtggattctttttggaaactgagcgaaatccaagatgctggcaccaagcgtattccgtgtggccctttggatggacatgctacctgaaacccagtgcccagaatatactagaatcaccgcatttcagtggactcctgaagttgtacttgtgtataattgcccgcgtcgtgcataggcaaagaaggattaggctgttttctttttaaagtactgtagcctcagtactggtgtagtgtgtcagctctgtttacgaagcaatactgtccagttttcttgctgtttttccggtgttgtactaaacctcgtgcttgtgaactccatacagaaaacggtgccatccctgaacacggctggccactgggtatactgctgacaaccgcaacaacaaaaacacaaatccttggcactggctagtctatgtcctctcaagtgcctttttgtttgtactggttcattgtgttacattaacgacccactctgcttcttgctggtgaaagccctgctctttaatcaaactctggtggcccactgactaagaagaaagtttattttcgtgtgagatgccagcccctccgggcaggcaagggctctgaagatttggcaacgtggcttaattgttctgctttttctgtagttcaatttcatgtttcttgacccttttgtataaagctacaatattctctcttattgttctttcatatggaatgtattttcaaatgtaaactctcttctctttctctctcctatctctctgtcttttttctctcttagaattggaggatttgccattgtccaggaaagaaacttgcagctttaacctgctgggaatggcaaacgattttactagactttatgtttaaaaataaataaataagggaaattcctaactttgccctccaaagtctaactttggttttcttgttaactggttaaagtgacagtatcttttttccttatctattctattcaaaatgacctttgatagaaatgttggcatttagtagaaatagtgataagttgaggaaagaaataatacaaattggctttcaagtgagacccaaaggaagaactggataaaatcttccaaatccaaaagcatgagatttttctatccaaatatgcaaaaatgacccaagagaactttcttattttgctactgagtcacacaagggaagtggaaggaagaacagttaatttaagaatgaaactataaatcctgatgcctgggggtcaagtattttaagataagagggggaaaaacacataaagtcaaacaaatgttttaaaaattcataacagcaaccttgaaaaaatagacttaaatgaatgcttctagaaacttccagcggctcacaaagaataagcctgccttagggctggcaacatctaagcctctaacagcacagggaagcaaatatcttaccaggcagcctatgaattaacccaaagaagctttggttggttttggtggatttttatcatgccatgttggacatgagattttttagatcttccttcccacattgctagacgtctcactcaaagacatttgttgggagtcacatttgcatcatagacgagacagtccattcatcttagttaaattggattgagaatgccttttgtttccaggaaaatattgatcaccatgaaagaagaatagttttttgtccccagagacattcatttagttgatataatcctaccagaaggaaagcactaagaaacactcgtttgttgtttttaaaggcaacagacttaaagttgtcctcagccaaggaaaaatgatactgcaactttaaaatttaaagtatcttgcactgataaatatatttaaaaattatatgtttataaagttattaatttgtaaaggcagtgttacaaaatgttcagtttatattgttttagattgttttgtaatttttaaaggtgtaaaataacatattttttctttatggaaatctataaaactttctgtagtaaaatgttttcattttactggtatattattgcttcatgttttgtaccatcataagattttgtgcagattttttttacagaaattattattttctatgacaatatgacacttgtaaattgttgtttcaaaatgaacagcgaagccttaactttaaatgacatttgtattctcagacactgagtagcataaaaaccacatagaactgaactgtaacttaaattccaaactatgactactacattccaaagaaacagttgaattaaacattttcataaaatatcccac

SEQ ID NO: 166 - DNA, 81819 bp, Homo sapiens
ctcccgcctggccgccccggcccgccgtgacccacggccgcctccggagcccgacgcggtaagtgcgacttccttctcggcatcggggagggggccgcctcgggcagggcccgcttcccgcccccacgcgactctcacgccccgctgcggcctcccggagcgcgcggggcgcgaagacgctgcccctcccggaggcggctgcgaggccctcgggtccggaggggctgggccgggcgggggcctccgcacaccgcgcccggggctcgaaccccggcccggcctccccgctgcgcacccccgagcgccggagccggcgcccgggccgccctggagttgtggaaagttgtggacgcggtgctggtggccggcagtgaggagcggactgcggtgcacccgttgctgctttcccggactgtccctgccaataaaacaaactggaaaccatttcggattttttttttcctctccttattacttgcaggcaattttgacctaagtttttaagcttttcttttaaataataccctcgcccccggagtgtggagaataagacggggacttcattttcccgagacccggcgtgcctggtgaaacttttgcatttaggcatttatttcagtgcatgctctgggatcagaagctggcggtaaaagtttgctatgtcagagagtaaagcgttactgtcgttttttatcgcttcatttcattttcaaaaatattcttcagtagtcgacaagttcacagaattcaaaaggtacaaaaggggcagacaggctcaccccacccacccctgcaccctcccaatattctgtttctggtgtcttcttccagaggttagatgtgcggatgcccctcctgcttgctttgaaaaatgagctgctgttatgtgcctggcatctgctggtgctaaataaatgttgattctccttcctgttaggaaacagtttaataactctttttggttattagacctctggcggcaaaaaaccaatcatgacttttttttttttttctggttttcagcatttacagatttgactgcattgtgaatgtgtatgtcctattggcttgttatgacttatgtgaatacttttacacaaagatgaatacactgacgttgttgggtaattgggcagggagggcagaatcaacatgaaattgtaagaagatgcaatatgtacaatatatagttccagaaactatatatttgaagcaatctagcgaccatgtagtaccataggataaaacaaactaaatgggaaaattgaggtagagcaggaaaagaagaacacaaagtcaagaaaaaagataataccaagttcctatttaaaagatcctgtactagagatgagtcacagtttgggccttgggcttcctgggagctaggtaaaaagagaaaaaggaacaacataagtttcagcctgttttgtctgggcgcggtgactaacgcttgtgattccagccctttgggaggccgtggcgagcggatcgcttgagctcaggggttcaagaccagcctgggcaacatagtgagacccctgcttgaaaagataaaataaaataacaaagtttcattttgtttctaattccaagattagaaacaaaccagttctgccctaaccaaggcgttttccagtaatgaggcctgagaggcgtattttcctcctgggccctaatgaaaaaaggagatatgggatgcagttgacaatatctttaaaacgcccctaaggaaaatagtgaattttgcacgacagtgtttttcaatataggagagtgataaaactgttaataagttttctgaaggagtggagtcacttgatccatttataacatttagaatgatctagaacagtatttcccaaactgtgttctaaggaatgagaaaatatttcctttcttgcaacaagattctgagctcaagtaagtttgagataactagattagaaaattggttttactacagaatttcttggagatttactatactaatgttcaagttgctgttttaaagcgggatgtattttgtaatattttccaaatctatatgactatgtaacacaaattgaggaccactgaacctagaaaaatagatgaattagctgggcacggtggctcacgcctgtaattccagcactttgggaggccaaggtaggtggatcacttgaggtcaggagttcaagaccaccctggccaacacagttaaaccccgtctctactaaaaatacaaaaattagccgggagtggtgccacgtacctgtagtcccagctactaaggaggctgaaggaggagaatcgcttgaacctgagaggtggaggttgcagtgagctgagatggtgccactgcactccagcctgggcaacagagtgagactccatctcaaaaaataaaaaaagatgagttatctattcttcaggcagttcttcattagtatttcttacaactgaggtttaatgagaattggaaagcaaagagttgaagttagccaatttgttaaggaccaaagtgaagataatctaaaagtcggcattttaacatactgtatagcaaaggagaacactactttcccccgaattctttcacatttcttcattgttctgcaagttgcctgttgaaggacctctagggcaccttcttctgtgcttcagggtacttagtgtctatgaattagactaggcataggcaagttgaagtccttgaggaatgactttattcttggatgtaaatatgggattgacattttttatcacaaacactatttgtactgttaatttactgtcaaatcataagcattccatagctatgagaaacctaagagaacacagtacagagtggaaagagcgaagatttgaagccagaaagtctgggattgtgtcactgctgtatgtgcagggttgtttccagccggttgatgaacctccctgaatctatttccttatttgtaaaattagaatgatgagagcacataaattcatttatggaataaatgttgagaatctactgggtactgggtagtagaaaaacagctttaagagaacaaatgaaataatgtatcaagaatccttcactgtctaaatttattccattcctgagtgcaggtggcaagagtatggaaggcaaggaattgcacctatccaaatgtatttggttccagagttcgagatggcaagtacagagagttgagagaatgaggtgttggtccaaaaatttatcagaatccattcggttcttgtgttcggatgatgagtttggataatgaggggcacttccattccaaagtattctccaaatgatagtgctatacaaaatgataccattctgaaaatagagggccagagctgttcattgcttcactccatttatgagaaaggggtttgctgagtataccaggcaggatagattatgctgtggtaacaaaagaactctcacatcctgttgattttaaacagcaaagatttttttctgttatactacatgctgaagcaggtcagcaagagaactccattacaaatggtcagtctcaggctgttggaggctgtatctcaacacatgcttccgcagttgttaggacagggaaaaggatgtggtgattttacattggctttttttttttttttttttttggagatgaagtttcactcttgttgcccaggctggagttcaatggcatgatctcagctcactgcaacttctgccttccagtttcaagtgattctcctgcctcagcctcccgagtaggtgggattacaggcgcccaccaccatgcctggctaatttttgtatttgtagtagagacggggtttcatcatgttgaccagcctgatctccaactcctgacctcatgatccacctgcctcagcctcccaaagtgctgggattacaggtgtgaaccaccgcgcctggtgtacattggctcttcagggcttctgtctggaagtgacacttaacttccactgctatttcattggccaaaagtcacttgactacacccaacttcaaggagatggggaaatgcatttctaccatgtgcccagaaagaggagaactggaatagtctgtgaacggtcttaatgactactaaagaggcttcagagtcccatgagctaacacagaatctaaataaatcaaaagccaaatatgtcagtacagtattctatttagaaaatagaaaacagcatttctttgtgtatgtgagtgtgtttaaacagaattatgctaatgagaattatgaagaatgtcttttattagtttgaaatgaaatgcttttgagaacttcacaattaagtttgttattttggccaaatgaatttcattctttttaaattgtatgtccattcaataaacatttgttgaatgtgtataaggggccaggtgtagtggctcaagactgtgcagtcccagcactttgggaggccaaggtgggaggattcttcagtccaggagttttgagaccaatctggacaacgtagtgagaccctatgcctacaaaaaataaataaaattagctgggtgtagtggcatgtgtctccagtccgagcttccttgggggcgggggtagggaggtgagatgattgatcatttgtgcttggcaggtcaaggctgcagtgagccatgatcaggccactgccctccaacctacgggacagcaagaccttgtctcaaaaataaataaataaaaaataaataaataaataaataaatgaaagtgtataaggcactgtgttaggcctgtgaggataaaaagataaatgagggtcgggcatagtggctcacgcttttaatcccagcactttggtaggctcaggtgggcagatcacctgaggtcaggagttcgagaccagcctggccaacatggtgaaaccacatctctactaaaattacaaaaaatattagctgggcatcatggtgcacgcctgtaatcccagctactccagaggctgaggcaggagaatcgcttgaacccgggaagcagaggttgcggtaagctgacatcacgccactgcacttcatcctgggcgacagagtgagactccatcccaaaaataaataaataaataagtggggagtttacaatcacaatagaaaatagctatacttgagttttctctccctttctctttaaggcatcatttacagtatgtaaatgatgtgtatacacacatatataaaatagtgaaaaatactaaatatataaactgttacactttgttcctctctgcctttttggacttaaggagtatttcatgacaaattaaacaatgttacttaaattagcataagcaaaagaaatgttatgttagaaaaggaatatagtttgtatcagagtccaagggcaagaagtacagctgggcctcaaagcaactggcaccaataacagaaagctaggagctagggctactttctctctctccaagtctatatgatttcttgctagtgtctctctctgcacatgtatttctttcttctttttctctattgattaatttttctctattttgctgttacatggatgttttaatctaagagtttatgaacttgaaactagaggctttaacaatttcagacaatctaaaaatgtttaagtgcattgtctttgtaagctcttaaccaccagacttaggaaataatgcagttgactctaaggtataacaaattagtgtaattgacaactttatagtagagaaagaggcagttataatagctttcaatcaaagaaaccgaggtgccatggaaagttctacacaattaacatgagcttgcaaattctagtgagacaggctgattatgataatcaggataagaaggtataactggatctgacttaagtaactacgatattccctccctgaacactggcaaatgccatctccattgtaatcctttcatccatcccttcttcctctcccagggtaaggattgactgaattgtctaactcttataagtcatctgctttgatcctgatacagagcttcctggcttctcctcatgggtaataatgcaggaagaacggcacatgtaatatactacctagctctgctcttttcttccatccaaactggtctcctagacactctttatctggacattttacattttaacatgctattatcatatctcttcaccaatttaatctaattttattctcaataaatttctatcattttctgttagactcgtgtatgtagcttcactagcagaattcccttgcattttcaaactacgcgataatctcctttcttcctgtttgaaaaatatccatagcttcacctcatcagtggccgaagagattaactatggggagatggtatatgttacctgaagaggatttcccagaaaaaaaaaaaaaacaagaatatgagtaaaagctgtgtatgagattagattcaggttgtagaatatctggaatgtcatattaagactcttagacacttgtttctgtgcaaatgaaggggttttcttgggtttaactaaacttcaaattcagaaagcttgtttactcagaaggctatcagacaggaatcatagtttgccagcagggcagcatcaaatgttcctcctcagtgggagtgattttcacagcagtccacgcaggcagctcatagccatctgggcagcacctcagaggaagctcacactaggtggtgcaggagctgccttggcttaaaaaaagaaaaaacaaacaaacaaacaaacaaaccaggtcccacaggagccagtgtctcttacacaactccatagactgagtttccagggttctgtaaaagctatgctaattaaaagagccatcacagggaagtcaaagctatagcttccttatgaggtatttatggttcatttatagttcttgagtcttgatgcaaatttactaatcacagggatcatttttactacaagtagtgttacctaataacagttgaggtacctagttttacagatggccagggaacagagccaaaagagttaactgaagcttaactctactcatacttgtattatctgcagtgcctttcattaagaagtattccataatatttcttttgcttattttgatgtagtgtttttactctttttaaatttattattattgttattattatttttgagacagagactcgctctgtcacctgggctggagtgtggtggtgtgatcttggctcactgcaacctccgcctctcaggttcaagtgatactcctgcctcagcctcccgagtagcagagattacaggtgcctgctaccacgcccagctaattttttgtatttttactagagatggggtttcactattggccaggctggtcttgaactcctgacctcatgatctgctcccctcagcctccccagagggctgcggatcacaggtatgagccaccacacctggcccatttactcttttttataatggagaaagtgaaataagttgagaggaaggtgagcctggaaaggcaggcaaagactactagatcattaaaaatcctgaattccatgctaaagatcttagcttttatttatcttgtagctgatcaaaaacaaacaaaagtaaatgttttaagtagagtgatgtagtcaagaattgcactttagaaggctactttggcgatagcatggagaataagagaggatttagacttgaagttggttggttcatttctacttaatatttgcctttctttggggagctatttctctgataagcagaaagaaggaatactcaagtccgtgctccgcaggagtttagaattgatggcctggtttctgcatggttctttggagaggcctgaatcagtttgtcctaaatttatttgtcatctccttccccccattggagtttgggaggactactctgaagtgcctcctaagaacattggatttaatctaatgcatgattaacactaagaaattctagcctcgactgatctccactaatctccatttgaccactaacatcctcattttgctttttgctgaagttaaattattgaacaggttattggtggcttttctttgggtctagttttagggcaagctaggcagtttctttaatggttaactggtttaattaacatttgtagtgattaaccatttctaattatgagcagttgagaaatagtgcttcacattttctcctctttattgctttcactgcccattactaccctttccctacctgacttatgctgttctaacaaaaatagataatttacaaaatctggattggtcctacagcagaatcaagttgatctgtgattggctcattatgtgatcagagagcccaggcaactttaattgattatacttgtgtctggagagtactgattcattatttttcagaaaaaattttttttaatctccatcaccataaagctacgtgaaagacagaaacacttctggatttggttgaagtcagtaaaagacaaatttgtggttatccagattgttactttttatggcacataagataattgggtgtctcagcacatgccaactgtaatggatcaggcaagaatttagcagtggttttccatcatttttttaatgatattacagttttcttccttgtgcacagcaaatatgtgcttaacactgacaaaaatctaaggagtggatagcaagggaaccttgtgttttaccagtcatcaagctgaaggaatgttttcaaaagtaacgattttgttatatcatagtagtatcagctgtaataacttttacaggtgagcttaaaataaaggctatataatattaatttagctgagttttaaaatgtcccttgctttactaccaggtatcagtactgataggtagttgtggaataaaacgattcttttgatgttactgtgggccagtactttgtaagaaacagcagcagcaattgggagggagctaagtagggagaaatctgtgaggcacttgtacttggtgaataaatgtcattttggcatttaactgcagttacgatgaacttaatttaagtttcttcttatttaagaaatcatgtgttccttaagtattctgttccccctccccgctgccttttgtgccttacttgcttttagtttggtcagatattatcggcaaagaatttgtctgttctgctactctctactagacatctaaccttgtccaagtcaactatactctcaatctacttcctcatttgcacaactactctacctgcctcacaaggtatttttgagtagtgaatgagaatacttcttgctttgaaagcaagaagcactgtggtgtattcgaaagtatatggtttttagggtccatcctggaccctgccactcaccagatataggtattaagtcaggttaattaatctcacttcagtatcttcatctataaggagtggtgggctgggggcaggaatgacccctgttggacagagtttttctgacaacaaaatgccccagtcagtgtaaagtattttatatattattgtgctcatttgggcacttaagagatagtagctgctgctataaatcctgaccgttactcaatacttagatgtgccacttacttaatcctattactgaagagagaactgaagacaaaggaggtgaagtgatttgcccaaattatacagctagctggtgagtggcttagctgttgactcaggctctttctgctgtgtcacttaggctaccattaataagtgataatgtgggaaaataacagcagaagcgctctccaccaactgcttctgaactgacttacagctctaacttgaggcacactcttctgctgtaaaatgtacttactgatagcatgggccaactgaacactcatgggtaagcaggcagctccatagctgacctgtacatctctgcttactcgttgaattgagtacttaccagaagttggttctgtttattcacaaacctgtttttaacagttatacttgttatagtaattataaaacattagtaaacatgtaaattgatgaaagtgtaaagaaaagataattcttcctatgaaaattaagttgaatgctttgggatgcctctatataaatgagttattttaaaaattctatcaagttggataaaggctggataattctaagagactagggaaaaagtcatcaaagtctaaagcagggcctgtcaaaggccatcaaccagctacctggtcttcagactactaggggtcctcaagaatataaggagtgcacattagaatattaattaactacattaggcaaactaatgcacactggttcagcaaatgttttgttttcatggtgagactttctccttgaagaaagcgatgcattaatttacaatctggcacaagtttttcctgtggtggacagaccactggtctaatggattctgtattcatattatttcagaagtgcttttaagttctgtttccatttatagaaaccataagtggaaatcatagatgatggatcattgtgggtacagcttatgcaagacaaaggacccaaactcagtaggagacccctatcaaatatatggcattaaccctatatgaaaagatttacaaatgaatgtgcatgtatatgttcaagttaaaataacatctttaaaggaatgtatttattatttttatgattattgacttttttctttagtggaccatctacaggtttcatctgaaaagggggctttcactgtactcagagttccaggttgactggaaataaatctttgacctctgcagctgtctaagcttgccttgctatatcttagcttatcatatgcattctgtgtgtatcttcgtcatgctgtattataatttttaaatttaatgtcagttcctgcattgtacgtgatatggtaaagggacatagtttagtttaaaggttaaagtttactccatttactttttttgccttgatttttttcctcttgatcttccctcgtatacttataggtatatattacagtgatttatttaggatacacaaagaaataaaatccctatattacatggcttttaccatgaagtcatcttcagttttcagcatatatcaaagtccttgactgcttagttttcagtctaccatgtggtttgtagagccagatgtcttggtataatacaactgaatttaaattgtgtgtgtgtatgtgtattgtgtcaatcttgccctgttgcccgagcagccgtgcaatggcacagtcttggttcactgcagcctccacttcccaggttcaagtgatcctcctgcctcagcctcctgaatagctggaactacactgcatccgactaatttttgtatttttgtagagatggggtttcaccatgttggccaggctggtctcgaattcctgacctcaagtgatccaccctcaggggtgctgggattataggcatgagccactgcacccggcctgaatttaaatttgacattttaaaattttcatttaccaattaaattagaagtatttcccagttgtttttaacaaagtgaaagatttaacatggtgctagaaatcttagttttgaatttcaaactataagtttttttaattacagaagaaattttggtgccatgtgtttgtggtatcgagtgaatagaatacaaacataaccaaagataaccagtgttaacccagggctcacttgttcacactttaaatttccggtttcttaaatagattaatttttggctctagagtcctatcctagctgtttgattgcttgatatataattaaaaccaaacatgtctaaagcctcactcaatcctcctgaaacaatatccttacctccttacttatgttaattttagtgttcttcttccagtcactcaaatttgaaaatgctgtcatctttgactttttcctctccatttgccacagccatcctataaggtctctgtaaaatcttcaacttcaaccgccctttcagatcttgttgcttccagtcaagtttgagctgtgcctctcacatggtagagttttctaatttgtttccttatgaggtatcttcccttgtaaatccatttttcaccattgccaaattaatcttaagatattatctgtaaatcctcacctcaaaaacctcaacttcaaccaaataaaggacatacttacctcttcttaattcagtaagagtttcattcaagaccctctgttgctggattttaaaatctttcaagtcaagagctgtgccattaatttattcattttttaaaatttaaagtcagaaattatttaaataccatgcactgtacaggttgttagggatatagtggtccctgtcctaattgatttttgtggtctatttccttatctttgcattctgttctgcttacagaacaaaagatttgttgcatttacagaaatacaggatattttttacatttttaatgtttgctttttatgagaatggagaagcagtacagaatatctggtatatttctagaattaaagtcaaggttagtaaaaatagatctcaaatcttttagggtaaataactgaaattttccaccatcatacatttttaagtgttagggaatttacatgttggtagaattatactaatattcaaatattttaaatcaaattctgatagacctaatttgacaaagtttaaaaagtatccctgaattattaaactttggagggtgcttcaaaatcatgcaatgcaacttactctttttataactgaggaaaaacagagaggtgagagctgctgggttagtatggtaaaattcttgatttttttaatgcagtgcatatcacacacttaaaactttagaaatagatttattaaaattgatgagccataaatactgttatctaaaaaactctatgtgaagagagattgatgtaattatgattactaatataaactagttaccaaatagccatgatttaagttgagtgaagacatagctttaaaagccacactgttgaagtgagctcaccttcagtctatcttaatgacatttcagtgtttctattgtaatactgaatagtgtcatcttttaaattcacagacaagatttgagcggttttgaaacagaagttgcacatgggtcctttaattacattttgaaaaatgtattcataattgacacatattatctattttaaataatacgtgagcttttgtatctcaagtttaacctgaaataaagcaaggttataaaattagaggtatagaatataattttgtaattagtttgaagaaagtgtgtccatttgaaaagacatctgtttagccattggatttcaagtgatagaattttatgccttaagaatgaatagaaaaaagaaattcttagaataacattgtgatttttctcctaagttgaaaaaataccgtacgattttgtcagccaggcagcgtggctgtaatccttggactttagggggccatggcgggtggatcacttgagctcaggaattcgagaccagcctgggcaacatggcaaaaccctggctctacaaaaattagccagatgtgatggtgcgtgcctgtagtcccagttacctgggaggctgagatggaaggaccccctgagctcgggaggttgtggatgcagtgagctgagatcgagctactgcactctagcctgtgtgacagagtgataccctgtctcaaaaaatatatatatattttgtcaccaaggtaaatgtgtctgtaattttaaaattagattctttattttataatttaaaaaatagtataagtatatacttttattattgctcttataattgttggattttattatagctcttataattgttgaataatttatgtattcattagagaaatatttattgagcacctactgtctcctaggtactattctaagtgctgggattacagtgataaccaaaacaaagccccacttaagcttactttgtagtgaggataaagacaataagcaaataaacatctaatatgccaagtggtggtaactgctatgaaaaaaattaggagggtcagcgggcttgtgaatgatgagtctaatttacagagagtagtcagtgaagaccattttgataatttaataatgtaatgatttttaatacgtattgatcgtttataaataattttcctgggaaatacttggcatcagagctggacaaattttggggcaaaacaattttatattgttggtgaaagttgtcggaacagaaaaaaaagtgttatttaagtgaatgctgaatttcatgccataaaggcattaatgtttaagcttacttcatatttttataaagaaaatatcagaaatataagaactacagatcaagaagataaagactgataacttaatagaaaaaaaaaggggcctaaatagccacttcatggaggatatccaaataaccaataaacatgaagagttattcagccacattaataatgaagaaaatgtaaaggaaaaccaaatgggataccattacacacctgtcagaatgaccaaaattaaaaagagaatatggccaagcacggtggctcacgcctgtaatctcagcattttgggaggccgaggtgggccgctcacttgagatcaggagtttgagactagcctggccaatatggtgaaaccccatctctactaaaaaaaacaaaaattagccaggcttggtggtgcacgcatgtaatcccagctactcaggaggctcaggcaggagaattgcttgaacctgggagacggaggttgcagtgagccgggatcacgccactgcactccagaaaccctgtctctagtaaaaacataaaaaattagctggacatggtggtgtgtgcctgtagtcccaactactcaggaggctgaggcataagaattgcgtgaacccaggagatggagcctgtagtgagccaagatcacaccactgtactcttgcctgggtgacagagttagattctgtcttaaaataaaacaaaataaaatgcacataccttcaacccagcaagtccactcctggcaataaattctgtagatataaaagcctcacaaggatgtttctttcaacattattttaatggcaaaaacccaaaaacctgaaatcaacctgaatgcccattagcagggagatagtttaataaattggtttttttacagtaatgaaatatcatgtaactcttaaaaagattattaatttatatttccatgtatatataaaattaggtgagaagagcaaaatgctaaaagatgaatacaatatgatctcttgtataacaatagcaaatctcttatatatgtgtatataagtttgtccatgatttataaacatggagagaggtgtgaaaggctatatgtaccaagcttggcgtcagcaatgattaccatgggaatgagtggaggaggattggcaaaataaaggtatcatttttcattgccagatgtttgctgtctctggcccctgcacactcaatgcctatagcactctggtcattccaacaactaaaaatctaccaccaccaccaccaccaccacctattttccagaagcctttaggagcaggttgatgcttcccttgttgagaaccagctacttagagtaactgaagtgtttacaaagatgatagtgcctgagctaaatcttgaaggatgaagtgtgttttttaaaccagagtttctctgggaggcaaacagtgttataaaagagggaacaccataatgtagactgccttgaccaatgaagtggtgtgtctatgttggaaaatggttagaaataaagttggatagctagagtgaagttagaaggatgttgatcagaaggagtctgacaaaggtgagaggagaggggaaagtgtcatttcactctctaatgcgtcctgcacagtactgccaagttaatttcctaaaacattgtcctgttcaacagtccattcaataatgtctttgctgcttgctcaaggcattttatctcatcgtattcatctaactttatctcttactacaccttaaaattaatttggtatggctggctgatcaaactgattatttcccacttcttccttgtagatatgcccacttcatgcttttattagaatctttttctgtagaaatctatcattctacctaaacaatgttttactattcttagcagccttctccctaatgaaactggcccataccactccattgccatcctgatatctcctttctttcttacagtttgtatggtttttcccgtattatttagcatgaaatcatacttggctttttatgcttctcattcttgtttctctgaataatttgtattaagatagacacctcacaatatttttgtaagcctccaaagtagtttttgtttttgttttttggtcagcttagataggcattgccttttgtatggaattagttgataaaggagtaaatactgagcaccctgaaaactcaaattctgcattgatagatcacactttaatattgcagcattttaatgtttcttattttaccttatcaaatattttgtatttggttcaatagctagatttaattattttgggggttaggaaccaagatatatatatctctgtgtccctgacaatgcctagtagattgcattgttcacaataactactcagtatttttgagtttatttgtatttgctttatcaatttgccttaactgtaaccatgttcaaaccattgtttgttttgctaacaacagagggcaccattagggcacttgtacacccaatagtcctatcccagtccctggtagcttttttgagccgcacttttccttttcctaagtaatgtcatagaaatttggatgttacactaactggcagtggcccatttctacttatagagaaatcctggcctcagtttatttgaaaaagagtatttgttacattttgatcctttgtagttttcaaactttttattctcctcattattctttatccaagtgaaatcttacccaggatcttactgtattaattagatccatttgttttctgaagggagaagatagaggtgaaggcaatagtctggagccccacctttgtactccgctttcctcctcattccccatccaaagagcacacctggaaaatcaccataactcatctaattttacaaatgcttttttaaaaacttgttttgtggtatttcacttagggacttagtttagaaatagaaacattttagttttaaagtgattatttttaagtacaaagggaaatgctatagaatacatttattgtttcagcaatgaaagagttaatatactaagcagcagagactgagatactgcaacggggatagtgttttctgtctctgtcatttgtggtttaagaaaaagggggtggtgttctgcatttgaaaggactttaatgaatgctgtcagtgtttgtgagacctaatggtcagtatgggaaaggagagccgggaaagtggtctagctgcttcaggataggtggatgagagtttgctctgattgaacggaatgttccaccgtgtttcatctttattcattatcctttgttctttaaaatctgatatattggcataaaagtaattgtagatatatatatgaatgtgatttattttcctttacatatttttgttgtgtacagcagggcatatacttctcttgtcttggttggatgcacaaatctgtgtgcagtgctttttgcccgttgcctagacgatcacttggtttctctgaggatgtctggttctcgtaaagagtttgatgtgaaacagattttgaaaatcagatggaggtggtttggtcatcaagcatcatctcctaattctacagttgacagccagcagggagaattttggaaccgaggacagactggagcaaacggtgggagaaagtttttagatccatgtagcctacaattgcctttggcttcaattggttaccgaaggtccagccaactggattttcagaattcaccttcttggccaatggcatccacctctgaagtccctgcatttgagtttacagcagaagattgtggcggtgcacattggctggatagaccagaagtggatgatggcactagtgaagaagaaaatgaatctgattccagttcatgcaggttgattattttcttactgttagaaaaggggtgtgggggtatggctctataatgtttttaaataatttagtatttattatttaaaatctgattatatatgtacatctgcatacatatatataatatcttggtatgaacatgtgatacttctgctagggtttttttaatgttctaatagtctgtaaaattacaaagacaacaaatagcattcattttgaaatatcttgtgttctatatatagatctggctcagctttgaaaataatatatagtagcaatttcatgtatcattgcctgtggtttgcttcattcattaaccttctatattcatatcaaaactatagaagatatttctatagtatgaaattttatgtgacattttagtttataacagatgatagagtcattttttaatttaatgaaaaggaaaggttttgcaaagagatgcacattatagtcaccaattttttgacacaattgtagttgtcaataatatttttcttatggttatttctctttgtcctgtctgtgttacagctctccagactaatatagagaatactaagtaacatgtctctaagatgacagctactaattcctgttaccttcactttcactgaaatgtgtgctatttagggaaatgaaggacattcctccaggagagtttaagggaatgtagaggggctagatgtgattatctggtgaaaaggggacaggaagaaggggaaatcagttagaagaaagaaaataaggaaaaaaataggtaatttcatagtgactttatctacctttatcttggaatctgcctttatctttgaaatggattttcttattcatcagtttaaactacaataagattatataacaacttagagcatgaaagtcatctttctgattaatcttcattcgaaaatatttctaaatatttaaaggcacaaatagcttatcatttgtctaatttgattattatatttttctcttaaaatttctgtgcagcttttgataacacttgtaatttgtaagttggttattaatgatgtaggtgtcatatggattgagacaaaatgaatttatatatttaagtgtctcttacttgaggatatttaccaccttttcctcttctaaccttaagaatgtggacttggaaggataaaaaatgtttactctagtcatctgtcatcttctgtgtaatggagagaggggaatatctgtatgtaggtaaatagtgtatttaatttaaattttttttaattagttcatgacttggcattatcttaagggaatagaagccactaatttaatttggagatcaattgagctaatgtggttcattgtttgtattttctttggagacttgttgccataaagagaacaatttatatagtaaaagattcatcatttttgtggagaaccaaagagtaaatgtttcatttgaaaatcaatatatcaagaatattttaacaaaattagaaaaaataaaacattcatttaccaacataagtaaattcacatataaaactcttaacatgttatctactactggagaaattataatgtgaatataaaatttttatacatgtgtaatcttggaaaaattatacacacattggttgctataattccttacaacaaaggtagtttgcatggctaatgattactgaaataaaattaagctattctttagtatgcatacagaaatatcttggtgggctattcattatgaaataaaaagattatccttttttgactgagagattgctatgtgcattcttcaagaattttaaattgacgtttttcatttataggagatataaaaataaaatggcatttttaaaaatctaaaataaatgaagttgtttaaaaaatgctactcaagaagactcatcaaagtaagacgggtgtggacagtttacatcttcagtgaccaaactattccaaaaataaaatttcaaaaataaaatgtactgtgagaaaatgtttttgatttttagatatgaggggaaatatgtcaaaggaatttaatattttggatggtttgaaatttcaatcttcttattgcaaataagaaaaaaacattcaagattttagaaaagtcctttgtgtgtatattctttttctctatttttttctagattaaatagatctaatttttacatcttccttcaacaccctggctgagtctttgacctttgtcataaagatacatttatttgccctcagctttttgattaagtgagcagtcagacttctctaagtagttgttcacctactgtaaacaaatcaaagcctgtcactgttaatgtcacactgacattcatcaattttttttttttttttttgagacagagtctcgctctgttacccaggctggagtgcagtggcgtgatctcggcttactgcaacctctgcctcccgttcaagccattctcctgcctcagcctcccaagtatctgggactacagacatgtgccaccactcccggctaatttttgtatttttagtagagatgctgtttcaccatgttggccaggctggtcttgaactcctgacctcaagtgatccgcccacgtccgcctcccaaagtgctgggattacaggcgtgagccaccacacctggcctcatcaattttttaaatataactttggaacaattctttttcttatataatattttgcaaataatatatagtaaatatatagtaaacattctgagcatactacagattgatatcttaaaatgttagacataatgaagaaatgcatatgatatactaattactcgttttaaccgtcataatatttacatggatttcagaacttaaactgaaattttgagttattagaaaaaggggaagacagctaagtggtcttacatactcagaatctcattaaccatggtggatctggacagtttaaagcaggaattaagggacagcgtatgttggtcatgttttatcaattgtattctaacaaggaaaaatgtctgtctgagtcttagacttctggtaatttctactgccatccacctaagtgatttaaaagtttcttgtcttttaactttgactttgcctctgtagcctagctaccttttctccatgacagtcatctaagtcattactttgctattaaaatacaaacttagtcttcttataacatgaggaattttagaccttaagtaacagagctgtcaccttttatgtgagcaataggatcctaagtccttaattgaggaggaattcataccagggctagcaaaatctatatggcggcccaccatgtaaccatagtataaacatgatttatacttcccttgatttactgaccttgaaattatgtaatttttgacatattttcaattggaggaattttatttcaaatttcatttataaagttagagtttaatatcaggctgttttttactccttttgcatacaattttactgcactttacaagtacagatgcctcctgacataaaatttttcaactttacgatgatggaaaagcaacatgcattcagtacattcctcaacttacaatggggtatgtcccaataaacccacaatatgttgaaaaaatatcctaagttgaaagcgcattttctatttttgatgggtttatccagacacaacaccatcataagttaaggagcatctgtgttaaaaaataatcattgctgatactaagcagtgcttcctaactgtgaggcactgttctaagcactttactatattaactcatttagtcttcacaacaaattcttgagttaggttgctgctattatcaacctaattctaattttatagatgagtcaagtgagacacagaaaagctaacttgctcaaggttagtaagtaaaatagctgcattttttaaaaagaaactttatttttttagaaccattttacatttacaggaaaattacaaagatgatacactaagttcctatataccccatacccaggttcccctgttatttatatctcacattaatatggtgcatgggttatagtaatgaaccagtggtgatacattattattaactaaagtccatactttattcacatttctttagtttcttacctaatgccctttttctgttcgaggatcctatccaagatatcgcattacattaaatcattatgtctccttagcctcctcttggctgtgacagtttcctagattttacttgcttttgatgaccttggcagttttgggagtactaatcaggtgttttgtagaatgccttactcagttgagatttgttttcccataattagactgaggttatgggctttggggaggaatatcacagagataaagtgccatttttttcacatcatatcaaagatacacaccattaatctgtcttaccactgttggtagtgaccttgatcacttggaaatggttgcatttttgaactcaaattaagttgtagatttcatgctcttaacaaacactgtactattaatatattgcctatatacttgtgactaatcacagagttcagctgtagcatatagctaattattcattctaactagtttcaccttctttcttcagttaattctcttctcttagttcttgagaatgccaagcttggctacattacaagtataatctcttgactcacccataactcttttttttttttttttagtgagacaaagtctcactctgtcacccaggctagactggaatgcagtggcgggatcttgggtcactgcagtctttgcctcctgggttcaagcgattctcctgcctcagcccccagagtagctgggattacaagcacgtaccaccatgcctagctaatttttctgtatttttagtagagatggggtttcaccgcgttggccaggctggtctcaaactcctgagctcaagtgatctgtccacctcggcctcccaaagtgctaggattacaagcatgagccaccacacctggccccataactccttatccacagtcttctaccccatcttactggttgcttgcctctctgtctttccactgcagatagcccaaactcttattttttggtcagttgatttgctactcttcaactcatcctgaaggcataggtcctcctcccctcccaacaagaggttatctgcataatatcaccactcctcatgggcattctcctttttcttgaccttctttatgttgtctctgcatcttattatttgatctagtctattaattctggttcagttttaaattaaattcctctaatgaaaaaaaaaatgtgtttccagggatagcagaagaagtttataatgaacttgtatctggaaaggataatattgcattgtctcccctctcacatatatgcccacatcttatcatggactccattgagaatgtgacataagctatgtaacctctccccagaaaacactgtgtgtgtgtgtgtgtgtgtgtgtgtgaaatatttcatatagggttcaaggagttcatgaaccctctgaaggctatctgtatgctgcatccatcaaagttcttagttttaagcaactgaagttgactggatgatttaaacagaaataggaagttattgaatcataatagttcccagaactgctgggaaggctgaagaattggcatacgaaaaggataggtcctacagttacacagttgaccttttaaactccaaattgtttaagcagaaaacctgtctttatgccatttattgctcacattttattttacctgtgtttcacttggaactagagagtgaagttttaagtgtttagaatcagatatattaggcatgaaaacaatggtatgtacatacacacacctcatagttaactacgtaactacataacttgctcatttaactttaggaagtatattagtaaggcataggctaaaatgatataacaaagagattcagaaacacagtggcttaaattagatggaagtttgtttttctatcacctcataggtgggcaagtggcccagggcggataggtagctctgcttcacaagttcattcagagacccaggttcctgttatattgtttctccttcctgtaggatattatcttttctccatgattgaagcttactcagctgtccctcagcatgccaacctgtaggaaggaccgaagagaggaagagaaaacattaagcaagcgacacaagttgcacatatcagttctgcacatattcattggtcacatggccacaactggttacaaaggaggctcagaaatacagtcttaccctaggtagccatgtctccagctaaaagtcatttactgtggtagatataaagaatggatcttgggttataatcaacagagtgcaggaagtgaagatggctgaatagaactcttcagagttctttggatctaatttttaagtgaatttttccctattaacattttatatatatatatatatatatatatatatatatatatatatatacacacacacacacacacacacacacacatacatatttatactatttttatacttttttaccatatatatatatatatatatatatatatatataaaccatagagccatcagaaaatagagataagtaaaaatgaaaaaagtaaaaatcatcaactacctagccacctcaaaataccaactgttaatttggggaagtgtccttctggtatattttctatacgtgtataatgtgtttttaaaataaaaatctcaatcttattgtacatattgttttgtagcctgcttttttttgccctaatgtaagtttttaaattaggactcgtggttgaaaatgacagaagcccaaatcaaactgacttaaacaaaaactagaaattttcggttcacataaataaaaagtccaaggatagagtctagctttagacatagctggatccaaatgatcaaataacaccaataatctgtttttctccatttctaaattctgttttcctttgtgatggcattatctcaggtagtctctcagtgcagtagcggaaaggccattaacagctccaagtttactttttgtcagcttagcaagctcaatggaaagaaagtgacacttttccaagagtgtgatcaaacatcatgaaattgactctgattggtcttgtttgggtcctgtgcccacgtgaaccaactgttattgccaggagctacaatactcttattggccaggcctcattggcttctacacctctgaccattccctgtagactaaggcagggaatgtgtggtttcccaaaaagtagaggtgggttttattaccgtaagaaggaatgctggataggaaaaaacaatgtccactacacagttctccaggccattaaatattctatatcttttcaaatggctccatcattcttccatgtatggattgtctttttgtttatttgaccagtattctatttttttgaatgtagattgtttccggtatttctctattagaaacaacctgtgataaaccctgtagctagatctctgtacctattgatgattctttcctttggacaaaatcccaaggggttttcacatttgaggggttttgatttgtattttcaaagtcatttcaggaacatttctattttaattctcaccagcattgtataaaaatgtccatttgcccttccccttcatactggttattatttaagaaaattggattcttataaacagcatttaactctcttcaccacagatattctggcactatcccaggggaaaaacgccctataaatttccaaatcaaaatatatttctcttgaggagggaaagggtgaagacatccattttccttagctcttattatttctctttacacaattgccttgtctcctcttcttcctcacccatataaatgtcaagacatttcaattctcacctactgcttgttgactttttaaacactagcccatactgatcttccccttttctgtattccagtagcaattatactccaattaaagatgcacaaggtgatcaattggagtaatggttaaaaatatatataaaagcttctatttatattttatcttttaaatttctgtttttgtctgtatattatatagaaattgtacaatggtgtctatatcttttataaattagtaaatttgggcacatgcttaaaagtatactgaaaaggatatgtatcaaatttagagactgctagcctatacctagcaacttgtagttttgaatatttgtagaagatgacaaaagattcataatatagtaagcacacttctgcaaaaacatgaattctgaatgccacaaactaggagtaaatcacttacctagagagtgagccagactatttagagtttcggaagagctttttttcctactcatagacagtataacttttataaattaatttgtaaaacttcttttgaaaaattactccattaagaaattctagtgtaaattctggcgataaaagtaaagggatctaaatagtttacaataaaaaggtgtattggccatggtgtgtattgtgtgagcacatgtacatgtaagcacatttaaaatctggggaattacaagggttagagttgctatttcactttttccagatatggagcttgactcttcaaattccaaatcccttcactagggaataatatatttcttagcatttccccagtttctaactggtgcagtgctgcaacattaatagttgctctgtgaatagttggtgacttgtttctatttgatacttgcctcttttctatgtttaggcatttttctgactttaaaattcattgcctactgcagagagagacataagctacaaattaaatgtttccctgtagactagaaatattcagcaatgtattcattacagtgaaagtctaatataaaagatttgaatgatcttatgtaattttctgaaatatgatttagtggtatcatataagcaaaactaagcagagatgttagatgtatttcctctgttgttatgtaaaagatcaagtagaaatcagagagaaatatattttaaatgcttcaggaatggcctattcccagatatttgtgttgtgggttaggatgtctactgagtttactaaaagccattttaaataagaagtatgaaatttagttataaaaaatgatgatgccagggatcattttttaaaaaagacaaccatccaaacaacattatataaagacaaaagactgtaattacaggccttcccattggccactgaaaagcagggttctactaacaatagctttccttgattgtgtactaatctgcactagggctgtgcatgcattagatcgtttaataatcttctcttgagggatcccctaaaagacagcactatgtattatttctgttttgctgttaaagaaagtaagccttagagaagttaaataacttgtccagaattatacatagtgagtgacagagtgagagttgaaccgaggtctataggactctagaccagcactgcacaatggaactttcagcattgatggaaatgttccatatctgtactgtccaatttggtagccactagccccaagagaatactgaacacttgaaatacgactagtgcaactaaagaactgaatttaaaatttttatttaaattaaaatagcctcatggggctagtggctactgtattggacagcacagctctagaaacttcctaaaatgtgcttcatcgctcaccaatacctccttaattctcttttcctattatatgctaaacaaaagatataataggaacaaaaagagtaaggaagtcttaccagaggtgcttaccagaggctgaggatggggagtgccaaagagagacttgggtcagtgtgcacaaagttacaattaggaggaacaagttctcgtgtgccattgcacaggaaggtgactatggttaatagctaaaagagagggctttaaatagctaaaagagagggctctaaatgtttttcaccacaaagaattgataaatattagagttaatgaatttgttaattagcctgatttgagcagttcactacatatacatgtatcaaaacatcacattataccctataaatatatataattgttatttgtcaataatatttaaaaaattatttttaaaatatggtgttcaaatctcgcctccgacctattgaatcagtctcagggtatgaggccttgaacactgcgactgaaatgctccctgggttgtcctgacttgtttcagcatctgaaccaaaataccctgaaagttcttgacaagaaaattattaactgggcatatgccaacatcagaagtagcctataataacagtgatgatagtattacaaagttctgttgttctttcagaacttaacattgattagcatctgtgttagatgatggcagttcatcactcaaacattcaactaatttatttgtttaatcatcacttgtagtttgatatgaagtacaagaaatgtgatacaaaatataggagtcttaagaaagacgtacttgatttatttacttgttcttgaatttatggcttataaaaattagatattataatttttcccctcaggtcactaatgctcttataatcatttgtcaatattttaacagtataaaactttatcaaaaaatattttaaatcttcaagttattattatttttatttatttatttatttttgagatggagtctcactctgtcgcccaggctggagtacagtggtgtgatctcagctcaccgtaacctctgcctccttggttcaaacgattctcctgcctcagcctcccaagtagctgggactacaggcgtgtgccaccacgcccagctaattttttttttatttttatttttttttttgtatttttagtagagacggggtttcaccatattagccaggatggactcaatctcctgacctcatgatctaccctcctcggcctcccgaagtgctgggattatagtacctgcgaaatcttcaaattattattcatcaaaaccaccattatttttttgcttatgttatcctgtctcctaaattttaaaatagtttctaattctcatttatttgtataagcatatataattacatactattcaacccatttttataataatgatcttaaatgtgaagttgagtattacttgacttggattttccaagtcattacaccagtaatattcatagtgtacaacacatcctttctagataatatacatttgacttctgttgtcattattgacaattatcctccaagggcatttatctgatgcccatgtttgtatggtactgaaaatacattggactaggaggatttaggaaggaatatttatcagttaaggcactgttaacttctaaaacagataaatcttagttcaatgtgagtgttcttgcttgagttatcttttatgtattttacttcttcctttttctaagtcttcaatcctctcccttcaacccgtgtatagagaaagaaaatatggaaaagccatacctgttcttagccactttaaggtgaactgtgtgatgtaatagttcatttccataagaacacatctatttgcaagagaggctgggaaatatagtctagctatattctcaggcggaaaaaagaatattttggtgaacacatagcagtttctgtgatagccctatctctgccatgaatgaactctgactcttggcaaggcacttaatctccttagcttaagttcctttactttaaaagtaagaaatatggtgacttttttcttttttgataaggttattatattaacaagattctcttaagatatagtggggcttgattcaacaaagcatatgtcacaaccatcatatccttaaaagaagatctgatgagaaatgagaactaagttatggcacagtcactggttttatagttaattgcataaccaaccgactttgattacttgatttaagtgatcctggagaggagaactgggtgtgagggtgaggaggaaagaactggactcaggacttcattcttagtcctaaccttttcactttttcacagtttttatcagtaaatcatatgaaaacagaacatacaggtgggtgcggtggctcacacctgtaaccctagcactttgggaggctgaggtgggcagatctcctgaggtcaggagttcgagaccagcctgaccaacatagagaaaccccatctctactaaaaatacaaaagtagctgggcgtggtggtgcaagcctgtaatctcagctacttaggaggctgaggcaggacaattgtttgaactcagtaggcggaggttgtggtgagacgagatcgcgccattgcactccagcctgggcaacaagagcgaaattccgtctcaaacaaaaaaaaaaaaaagaaagaaatcagaatgcctactcttcaaattataatttagaaatttcaaataattttttagacagctgtattaggctatcaaattcctttaacctgtaatataagttatagattacctgggcttttgaggactggacagagaaccaaaataattatttataacactgtttttatgacaatatattttttaatgaacttgacttgaatttgtatttccaaaataatttaattgcctttctgccttcaaagatgaatgatctcttatatccttaaatataacgttaggagatgtggttatcaatatgaatatagcttagctctttttcagcagagacattggctttaacagagaaaagacctcacaaaaagatactacaaagaatatatgtagcaattaattaacagtttatattcacttacagtgtttacaagaatcatatgacttaaggcatcattgatttttaagagactaaaatgatgaatgattatacattaatattgataggtagcattgatttcttctattacatttgaaggctttcaaaagacttaataggaaagatctttttaatgtgatagtgatatttcaaaatgtgtgtttttttttcttttcaggacttccaatagtagtcagacattatcatcctgtcatactatggagccatgtacatcagatgaatttttccaagcccttaatcatgccgagcaaacatttaaaaaaatggaaaactatttgagacataaacagttgtgtgatgtaattttagtcgctggtgatcgcagaattccagctcacaggtagttgttttctatatttctgtatgtgtgaaatatttcctcggtaatttagatatgtatattgaggtaacctacttcaattgactattatgtttttgggaaggggtgtagttcatggaatttccatcaagaaaacggtgcatatgaaattattacacatttggtgatcctaaaagggtcattttcctgctgtagaagcacaataacaaaacatactagcctcatataagttggtattgttcggtgtagattgcagctactataagaagcttttatgccatattctacctattaaatactttaagtaaactcagtggcaattaaagtttgtggatatttagaagaagaaaagctggtgaagtggactagcaaaaactcttaagagtttttaaaatagccatatctatcccaacttctgtttgctgatttccaagaagtatgaaaagcagtgctagggaaaaaaagcctttcctacaaattacatattatttcttgaagtaagaaaaggaaaagagccatttaataaagaataattcatttttttataattctgtattcagttgttcattgttaatcaccactatgattctcaaaggtttttttttttttttttggatgcccatcaaaactaattgacactgtgtcccaaaggttttttttaaaaaccttccaaagagagataacatcggaaaaagccttctagacattggcttaggcaaagacttcatgaccaataacccaaaagcaaatgcaacaaaaacaaagataaatagatgggacttaattaaactaaaaagcttctgcacagcaaaagaaagaatgtctgtaagttaacagacaacccacagagagggagaaaatattcacaatctgtacatccgacaaaggactaatatccagaatctaccaaaaaactcaaataaatcagaaaaaaaaaaacagtcccatcaaaaagtgggctaaggacatgaatagatagttctcaaaagaagatctacaaatggccaacaagcatatgaaaacatatttggccgggcgcggtggctcatgcctgtaatcccagcactttaggaggctgaggcaggcagatcacgaggtcaggagattgagaccatcctggctaacacagtgaaaccccgtctctactaaaaataacaaaaaaaaattagccgggcatggtggcaggcacttgtagtcccagctactcgggaggctgaggcaggagaatggtgtgaacccaggaggcagagcttgcagtgagccaagatcgcgccactgcactccagcctgggtgacagagcaagactccgtctcaaaaaaaaaagaaaacatgtttaacatcactaatgatcagggagatgcaagtcagaaccacaaggcaataccaccttactcttgcaagaatggccacaatcataaaatcgaaaaataatcaatgttggcatagatattggtgaaaaggggacacttttacactgttggcaggaatgcaaactagtgcaaacactacagaaaacagtgtggatattccttaaagaactaaaggtaaaaaaaaaaaaaaacaaaaaacaaacaaacaaaaaaactaaaagtagatctaccatttgatccagcaatcccactactaactatcaattcagaggaaaagaagtcattatatgaaaaagatgtttgcacacaagtttatagcaccacaattttcaattgcaaaattatagaaccagcccaaatgcccatcaatcaacaggtggataaagaaaatgtggtgtatacatatatcatggaatactactcacctataaaaaggaatgaaataatgggattctcagcaacctggatggaactggagacttactctaagtgaagtaactcaagaatggaaaaccaaacatcatatgttctctctcataagtgggagctaagctatgaggatgcaaaggcataagaatgatacaatgaggccaggcgcgatggctcacacctgtaatccagcactttgggaggctgaggcaggtggatcacgaggtcagaagttcaagaccagcctgaccaagatggtgaaacaccatctttactaaaaatacaaaaattagcccggtgtggtggcaggtacctgtaatcccagctcctcgggaggctgaagcaggagaattgcttgaacccaggcagcagaggttgcagtgaaccgagatcacgccactgcactccagcctgggtgacagagtaagaccctgtctcaaaaaaaaaaaagaatgatacaataggccaggcttggtaggctcaggacctgtaatcctagcgctttggaaggccgaggtgggtggatcacttgaggccaggagttccagaccagcctggccaacatggcaaagccccatctctactaaaaatacaaaaactagccaggcgtggtggcgtgaacctgtagtcccagccacttgggaggctgaatcatgagtattgcttgatcctgggaggcagaggttgcaatgagccaagatcatgccactgcactccagcctgggcgtggagacagagtgagactctgtcttcacccccagcaaaaaagaatgatacaatggactttggggacttgggggaaagggtgggaagggagtaagggataaaagactacacattgggtacagtgtactctgcttggaggatgggtgcaccaaaatctcagaaattaccactaaagaacttattcatgtaacaaaacaccacccattgccccaaaacctactgaaataaaaaataaaaaataaaaaaaccttccaaagtggaaataaaatcattaggaggaattggcttggtattaaaattttcagtgactcaattagcatacatttattgagatactactatgtactgtgacagaaagtccaggttatgaacgtgggtttgttagaaaagctatttcaacccgaatttcatagaggcacctcaaattctgtatttccaaaactgaactcattcattaccttacctgccatgcttgtgtgagccatcaacatctcacttagatgactgatgcaaaagcctcccaactggtctccctgcctccactctttgcccctacattctgttttaacgtagctacctgagtgatcctttaaagtggaactcagattcagtcatttctttgatcaaatctttcattgactcctcatgtcactgagtgtgaaagggaaagtacatgcaatggcgtacacgatccagcctgccgtatctctctagtattgtcctattggtctctgtcttgttcagtcagcatcagccactcagaacctcttgtagttccttgcatgtgccaggcatgctgctcctacctttggaattttgcactatttcttctgcctgaaggctatttccagatacctgcatgaccaaatcctaaacctccttcacatctttgcccgtgtcactttccggtgagaccacctatttaaacttaccaccctttccccatttgcctttgcccaactttttttccccttagcacttatcacctcttaatgtactacagaatttacttctactgatcattgtctccctaccctctaaatgtaagactccataagagaagggatcttttgtcttattttgtacccaatgtatctcaagtatctagaacagtacccagtatttactggacacacatcagtatttgttcattaaatgaatgaatgaatgaatgaatgggcagttttctgaagaagcaaccaatggccaataaacatttgaaaaacctcactagcaatcagataaatgaaaattgaaacaacaatgagatatcatttaacactttatggccaaaaattttaacatctgataatattatggggaaaatgttagtcttatacaatgctggtggggtctaaattggtaccttactttggcaaatctaatggctcagcagtgccactcctggggaggtaagaaaatggaattagagagggagccaatgattatctgtatcataatttttattacttttaaaaatgaaaatgtttatttaaaatctatttaagtgtgttgacatggaaatatcttcaagacattatccagtgaaaaaatgcctgtttcaaaaatacggccaggtgctgtgactcactcctgtaatcctagctctttgggaggctcaggtgggctgattacttaaggccaggagttcaagaccaacctggccatcatggcgaaactccatctctactaaaaataaaaaaattagctggacatggtagtcacgtctgtaatcccagctactcaggaggctgaggcaggagaattgcttgaacctgggaagcagaggttgcagtgagccgagatcatagcatggcacgccagcctaggaaacagaatgagactgtctcaaaaaaaaaaaaattataatttaaatgtattatatatgaccattaaaaacttagagacatagctaatatattttataattataaaaaatatagttttatagtgttattacaacataattttaaaacaaaatgcagactaagataataatagaatattataaaagtttaaaacttgctagcaaaaaccattttcaaatgtctcccatatattcactacttctataattaaatttttttaaaaatggcttagtttattttcaaaaatgataaacaataacttttaaattttttcctttatatagttgatttgatgctatgggcttatagcttgttttctggatgtcatatagcattatttgagtagtgaagtggtaaagcattcacctcagcagaaaatttggtaatggtaatttattattcaaaggaaggaactagagcataaagcaatttgtcaagcttaaaatgcatttcctagtaccatgcactgtgagtaacaaataaaaaagaagcagcagcatttattaatgaacatcaactcgaatgtggtcattgattttttttttcctaatgtgttcacagattggtgctctcctctgtctcagactattttgctgccatgtttactaatgatgtcagagaggcaagacaagaagaaataaaaatggaaggtgtagaaccaaattcgttgtggtccttgatccagtatgcttatacaggtaacgagtctgaaaatgtaaattaaaacctcttagatttatgttgtattattagatttcagatttctgtttttagaaagcatgccatagctaacagttagttctgctattgtcattactaccctttgtatttaacctggtgatgaattaaaatttccatactaaaacctttaaaatggttatcataattaagtttttgaatggccctttaaaatgttaatataaaaattaaatgaattacatagtgtcaaatttttgcatttaaaatttgagagttggccaggtgcagtggcttatgcctgtaaatcccagcacttcgggaagccaaggcaggacggatgatcgcttgagcccaggagttcgatgctgcagtgagccattggttacaccactgcactccagcctgggcaatagaacaagaccgtgtctcaaaaaaaaaaaaaaattgagagttatacaggtatatagtagacataagttactaacgtatcattttaaaattctgaaaataagccattagtttttattttagtagatgtctcaaggagctaataattttttccccatttagtccttcttttctttttgggatgtcttaaaccatgtaggtctgtaatgcatgtaatgagctcttatatggaaccactactgttaacatcaattattttataaaataaggttaatgtagttccatggctaatggaatttctttttatcattaaggccgccttgaattaaaagaagataatattgagtgcctgttatctacagcttgccttcttcagctttcacaggttgtagaagcatgctgtaagtttttaatgaaacagcttcatccatccaactgtcttggaattcgttcttttgctgatgcccaaggttgtacagatttgcataaagtggctcacaattatactatggtatgtattttttgaaggtgagaaagtcgatcctccatatgcatatttcttattgttgcaggcttatctgcatgttactgttttcccatggctctgccacgtgtcttgcgattgagcttcattgcctagtgtgtcatattttcattgagttataatgggaaagcaccaagtaatacttctcgtgggtatctgaatcaagccctaagttactgcagtcactgggaagcagaacagtggcctaggactgttccattaagattttcagatttgctgctttttaaaataggactctccccaaacattttactttgctgcacatggatgaatttcaggattgttcacatattcactgatagaaattggtgacagaggttgcagcatattggtagaggacaaatgggaggctttttgttaaggataaatctgactatgtataaactatttacagccatgtagaatgatgtttttattcattatagcaaattatgtgctcaataaatcatagaagaggttctgattcagtagcctgaaggatgataaaacgaaataatctgtacaacaaacccccatgatacaagtgtacctgtatgacaaaccttcacatgtacccctgaacttaaaagttaaaaaatggattgacctaggatagtaagaaaataagggcatgttgagagcatagtgttaggaccaccctctgtggtcttaacagtagaggggtgcaggcaagggagggtgttatgggtttttgaggaatgttgccacactgtagcagttagttcttcacacctgggcaatgactgaagagtgttgctttaaatgcttcagtttagggcaatacagtttctaagagaagaaaaaatgtgaatattcacatacatatgtacagttatggatattaccaattttatcaacatttaagaaatgttattttgcctaccctctcctccgtcgttccactgagttgggatatgaagagattgagagtgctttaggaatctttcattagagaaatagagatttggaaaaattgtaagaataggtatttacaaactattggcaagatcaattctgtctacttcatgagcttggtgtgaggattagatgagttaatggaattttaacactcagaacattgattggcatgtcatatatccagtcagtgagtctcattccattgttgtcatcatcattatatagatttcctctatccaaaacaatagaaaattatgggagggaacaaaagcactcacaaaaccacagcctttaatgactggttttcctccctgtggtgtaatcatttctcaggaattttttatgatagtcacagagtctcaactgaaaaaataaagagattgtacaacaggatgataatatatagccctagcatgctattatgttgacattttaaaaattaagtccattgaaatgtttttttccctcggtctttatcactctttatagattctcattttaaccatacacctgcagtttcaactacttttttgaatgagatgaatataaataaagttggatttttttcttcaaaatcagtttagaatttgaataatcatcttttttctaggaaggtgttttattcaggtgaaaacatttgtatgcatttaggtcactcctgttgtttacagtagaggcatgattgctgctttaaggcttacacagaaattaaatttaaattagctggatgtttttaaagctattttcatagccaattagttgtgttagattttttttctcaaggccattatttaacattattcagttttaacagagacatgaaattgaattctaataacaataagtaatttagaggcagcttgtctgatttgaattgttgctatgggaaccaaatgaaaatgtatagcaaaattcaatcttcaatttaaataaatccctccgtaatttcagttgcctaaaaactattccaaagggggaaaggtcacaatgctagcaagcgtttggtaacatgatagttgtgtatattataatatggatttaaaatgtaaagcataatgccacgccagtgagttcaatcagtgaatggtgcgtggactggggatgttcactgatcctgcacgaatacaagtggtaaaaaatgaggagtcctctccaggatccatgaatctggaaacctgttttctcattctgcctgccactgaacatgacctggagcaagtcatgtaacctctaaaaaagtcttaagactggttgtatgattacaactatttaatgtcattttgaatttatgacacaaataaaaacatttaattttaaaacttaaaattgtctttctcaatctagaagacttataaaaaacattgagatctgctaaagtagctgcttcaaaaccaaattaatacttttgaaaaatactttgtattcaaccttgagttcagtagtatttcataagttgttgaaaaactcagttttcacttaatgtaagttatactagaatggaatgggcattattctgaaatagatatatcaacaaataattcgtcaagtgcatatttacgtgatagtccttttgttactgatgaaatccaattaatgccatttgaaagtatggcatagttataccaatgtataaatctgtcaattatactttatatgtttaaggaattggaaatatatattattatttcagtttcttcacaatctcacataacattttatcataagtacctttccatgtacctacgtgatctttgtctttgaaatttttaatgcttatttaatatacagctccctataactgaacatataggctatttcccattttttaccattgtaaataataatacagagaagtattgttaggtagtcagctttgctttttgcttacaaattattattaaggtttaaattacaagtgggataactgggttgagagtttcaacatttttgtagatcttgctatgtgttaccaaaataatgtcagtatgcaattcaatagaaccttttgcttgaagccattctagcactgaagttttattaaaatatgtttctgaaaatgataatccatcatttaaaatagactcatttagacatccttgaacaaatcatgataaattgaagcaattgaaattcattaattattcatgaatggttttcccctttagaacttctactgataggaatgtcaagctaatatatattttagattagtacctcactcaggttaccacaggctatatggaaaatataattctcattttaatatagaagatagttattgatagtccttatttctagctctaatttaaacagctttagcttctttagtaaacctctgcatgctgagacagcgataatacatcaggaaatatgagaaaaacattaagggacaatatgtgtctagtatttgcatttataaccgtgtcaactatccattcattaagacttaaaacctttcaaatcagatggtatgttttccttctctccagattatttagcataatagcctatcaaggtcatctcacacctaagggcatttttatttcccatttcaaattatagaggatttgattctaacgtgaggccaggactgagtcatcttcagtctaatgtcctgatcccagggcattataggtcactacttttttttccacctttggtcctttttcctgtgagaccaaaagagctttgtaaataaattatattagaagagattaaaaatttaaaaacagacccttaaaagagattaaaaattcgaaaacagacccaaaatcctagatgatcttataaatatcattaaaacgatcttgaagaccgatttgactgtcgtataactctaagaacaaatactcattccagggaggatctgagaagacatctgtggtctagaatgattctgggaaatgtagccactctggaggccatttcttagtaagagaagtaaccaagctctctaggtatttggctccactgctggccgaattcttcagcacccacaaatccaaaccgcaaatccacccacttctggtgttagagtatcatacatctcagtgtctaattcattatttctctcttccttcaaaagaattgccaaaagtatttcctaacttgagtgaagtaacacttaaatgtcctaggtccattttttaaatgtaataagtgatacaacactttaattctacttgcatatgtttaacaacataattgcagtttaatttttttttctctgctgtgtttctttcctaacaagtaagtattacattgtaaggtctaaaatataaattgtgtgttggtagctaatataaaaagcttttactttcttctaagtaaattgtgaaggtcagaaggaacaatattgtttatctgctatttcttccctctaggagcatttcatggaagtaatcagaaaccaggaatttgtattattaccagccagcgaaattgcaaagctcttggctagtgatgacatgaacattcctaatgaggagacaatattgaatgcacttcttacttgggtccgtcatgatttggaacagagacggaaagatctaagtaaacttttggcttatattaggctacctcttcttgcaccacaggtaattaataggcacttgtttataggaatttttctttgcctattctatcaaagaaaataattgtacatgtattcctatgaaacgtgtaggtgaaaagatagtgagctaacaaaattctgcttatgctttcagtccagaagatctggctacttaaattgcttcaattaagtaacattcttttttttttttttttttttttttgagatggagtctcactttgttgcccaggctggagtgcagtggcatgatctcaggtcactgcaacctccgcctccccagttcaagttattctcctgcctcagcctctcaagtagctgggactacaggtgcatgccaccatgcctggctaattgttgtatttttagtagcgatagggtttcaccatattggccaggctggtctcaaactcctgacttcaagtgatctgcctgccttggcgtcccaaagtgctgggattacaggcatgagccgctgtgcccggcctcaattaagtaacattcttgattttgggttagtaacttaattgactcagctacaaacctatcctaccaattggaggagaattaccaaaactgctaataaaaggagcactggactcttgaaaccagaaaatttagattaatttctttgccacatgtttattaagtatccactaaatattggattctggtgatatatagattaacaaggtatattaatagtcaaagctctgacattttaaaactctgtgacttggcatattcacacagctgagtttcttcatctgtcaagtagagataacatcttccctgactacctcacaggattattataaggatcagaaacatgctctatgatataaaatgtgctatgaataaaaatattatttcagaattaagagatatctagttggtgtgttcaaggcaatcagtcataacatttacatgcatagttttcccctttttacaattttcactggaatatataaaaattttccctgcatactttgctgcctatctcaaggccttgaatgctgaaagaggtcttgaaagcagaaaaagaatgagctgttactgttcaagttcagactttctttttctttttttaatttaaagtgtcacaaatgttctcatatttgcagttatcttgagcataatgtattatttcctgctgttgtgagcaaaagttactgtttgttttttacagagacagtaatcaatatggatgctttctaagaccttcctcttcagaaatagaatattgtatgaatacatagaactgaaactgcatgtgttgatgataattcaggaaaagtaacataataaaatgtttctcttgaaatcagatttttaaaagggagttacatttttactgctacttagcagatttttaaaaattctttctagatgaaatcaaaccgaatttgaaaaatccgattcgactttgagaagaatctgtgtaattaagtaacctgacaattgacttcacttctgtagtttcagatatttatgatactatatttgcatgactctcatagacctttaaaatatctcttatccaggatactgctgataatcctagccataagttcttagggttgaaaggcattttggagatcatttgttcgaacacctgttgtacaaatgaagtgacagaccaaaaaagtaaatccatatgttcaaaattacaatgtgattgcataaattcctctctttctgcattgtagttttatttagtttttgctatttggctaacatcatagggctaataagaggcagaggtgggacttgaacccaagtacagttctgtgccttgtccactaaaccattctgcctcttgagtgtactgtgtgtaaaattgctgggggtggcagggagatggtatcagatggtggaagaaatagattaaaaaaataaatcagtgattataatgagatgaagactgtgacagatacatgaatgtggcattctgaaaataatagaagtagcccaccaaaaagagggggttttgacgagaaggcagggagaatttcttacagtgttatttgatccacattatgaattagccacccaaaagagggggcatgataaccaggagaaataggagcttgtacttcatcatgaagtcatgagcaaatatattgtgttttggaatttgaaggtagtttgcatggctggactgcagaaataaaaggggataaagtaaagagatgaggctgaagaggggaatggaccagaacatggagaacctctagttatgccaaggagtttgaattttatcctgaaagcaatgaggaagcactaaaggatattttaataggaattttatttcagaaattttattttatttcagaaagattactataactgcattgtggagaatggatctgaggggtcaaagccaaaaaccaattaggaaggcttttggaattcagacaagtgaattaggcacactgtggcagtggatatagatagaaattaccagactcaagagctatttatgaggtcaaattgacaaaacttcatgactgaatggtgaaggtatacaaaaagaggaatcaagaatgactctgatttgtgcaattaggttaattaaaaggtgccggcaattgaaacaaggaatatagaatgaagagctaattcagggaatggggaaggaagttgaagaatcatgttcccaaagcttcttggcacctttaattcttttagagtctaaggactctgaagtccttagacttttttgaaaactacttccttagattgttgaatccaaaggcaagagaatgacactggccaaggagtacacaagagtgcttgggatggaaccctaggaaacacagtatatagtggttgttcccaaacctggctaattaactgagtgttattaaaaattgatgtcacacttgaaaaaggacgaagttttatcatcatcctttgctacagagaagacaaggaagaaaaatccagtggattagcccagtggttcttaaagtgtgatccctaacaggaagatcagcactactggggaacttcttggaaatacagattaggcctcaccccacacctactgaatatgaaactgtggggctggggcctggcaaatggtgttttaataagtcttccagtggctttgatgcatcctcaagtttgagaaccattatccaccacaagtagtggtgatggaagccacattgccttgtataatttaaacaagttactttacctctcagaacatttttctttcctacagtgataatactgtgctgcagtattgtgacatttagagatattgtcagggttgattttttttcattgccaaaagtgaatggcaagattgcagaattagagttatcaagtaataaagttttgaagtagacactaaaataatgaagaaaatgttggattgtattcggtatgttttattttaaaaggtaggaaaatataacaatcattaaattgccatatgccaatcaaataataaatgactaatattttaaaaattgggattaggtctgtttaccaagagaatttatttttgtgaaatagttccttttccaatgataccaactaaatgagattttattctactctgttaatatgaaacattccacttaccctagctagaagggattcaacttacatacagtaattttatcatcgtgtctccaacagtagactcttaaaataatataggaaataatgcctgtgattgtaatcctctaccaaatgatcctttttgtatggtttttttttttttttttagactgagttttgctctttttgcccaggctggagtgcggtggcacaatctcatctcactgcaacctctgcctcctgggttcaagagattctcctgcctcagcctcccgagtagctgggattaacaggcacatgccaccacccccaactaattttgtatttttagtagagatggggtttcaccatgttggccaggctggtcttgaactcctgacctcaggtgatccacccacctcggcctcccaaaatgctgggattacaaacttgagccaccatgcccaacctttgtatggctttttaaaaaactctgaataatccagaagagaagtatttatggtcattttattttatattttgaggcagggtctcactctatttcccaggctggactgctgtggtatgatcatggctcactgcagcctcaacctcctaggcccaagagatcctcccacctcagcctcctgagtagctggaactacagacacacaccaccaacaccaccatgcccagtcagtttttaattttttttttttttttttttaagacagagtctcactctgttgcacaggctggagtgcagtgacacgatctctgctcactgcaacctcccatctcccgggttcaagcaattctcgtacctcagccttctcagtagctgggattacaggcgcatgccactacgcctggctaatttttgtatttttagtagagacagggttttaccatgttggccaggctagtcttgaactcctgacctcaagagatccacccacttcggtctcccaaagtgctggaattacaggtgtgagccaccatgcccagccggttttttaaatttttttgtggagaaagggtctcaccatgttgccctgagtggtcttcaactactggactcaagtgatcctcccacctcggcttctcaaagtactgtgattgattttattttacttttgaaagcattccaaacatttcaatttgatcaaattttaaaccatgtgaatagaaatacagacatatatacattatttaaaagattttgacacctaaattatgaacgttttcaatgtttagcctgaatttataagtatctgagtctccactattctgctctcagtttagtattgttttctacagaaagtcagaaatataaaatgagtcagtatttacctttagcattcttttagtttacaaggtcttgatactaaaacaacttttttttttttttggacagggtctcactctgtcacccaggcttgagtgtagtggcacaatcatagctcactgcagcctcaaactcctgggctcaagtgatcctcccacctcagcctctcgagtagctgagactacagtcactgtgccccatcacacatctgactagttttttttttttttttttttttttgtagagacagcgtctcactttgttgcccaagctctctcaaactcctggcctcaagcaatcctcccgcctaagcctcccaatatgctgggattataggcatgagccacctcgcccagcctccaaaacatttttttaacatctatagagttaataaattattcacattctatttgtgtttgaggggacagttttagagcaatagtcataaggtgaacaaatacgaaagtgaggataaaaatttacaaaatgaaaatttattcctgtattatgaatgctttcagtttaataatttgctcttcttttgtagcagagaaggcatttagtattcaccaaaaatgcagagttcatgaaagtatatattttgtagtttttctctcagtgtcttctgaataattttctaaatgatacctggttcctcccatttgattaatctgatacttagattaatggcttttcttactcaaataaaattaatcctacttattcataatttatagatactatctgtatattaggaaatatactttgcttcaaattgcagttactattaagtctcccaagagtttactttctacatttttttcacatttatttttatttagaaaggactaaagtaattgtatataatagaattaacataaacattaaaattaaccttaatgagccaactttatgcatattcactaatggtttctgtgacaagtataactaggttttgcgtgcatagaaaaaaatgtggagtaattaataccaaaatgtatattctggtgtaggtcggggacttaggtcttaatttggcttttttgcctttcgtatgcagtgctagtttccaaataccaccaacttttttatagtgactctttttagagactgtttctctcttcgtctataaaaacatgaacatatcatcaacatcattagtcactaggaaaatgcaaaataaaaccacattttccaccttcccgaatggctaaaatagagacaaactaacaattggcgaggatgtgcaaaaacaggaaccctcgtacagtgctggtgggaatgtaagacggggctgccactttagaaaacagttaggttgtttcttaaaaagttaaacataaatttgccatatgccccagcagttctactcctaggtaataattacccaagagaaatatatccacacaaagacttggacataaacgttcttggcagctttattcataatagcttgaaactggaagcaacctaagaagcatccatcaactggtgaatggatagataaaatgaggagtaccccgatggtggaatattactcaacagtaaaaagaaatgaagcactgatacgaggagctacagcagggacaagtctcaaaagtgtgctaagggaaagaagcaagacaccagagtctccatattgtatgattctctgtatatgaaatgtccagcaaaagcaaatctgtagagacagattagtgcttgggagagaagatgggaatgaggatcaacagtaaatgggcatgtgggatctaattgaggtgatgaaaatgtttcaaaactgttttatggtaatggttccacaacttggtaatttactacaaatcattgaattgtgtactttgaatggataaattaggacacgtaaaatatgccccaataaaattgtaaagaaatatattgtcaaatacaacccacagtgtatcaaaaggatacactctgaccagaaaggtctttttccaggaatactaaaatgattattaagaaatctatgaaggggcaaggcatggtggctcatgcctgtgatcccagcactgtgggaggccaaggtgggaggatcacttgaggtcaggagctcaagaccagcctagccaacatggtgaaaccctgtctctactaaaaatacaaaaattagctggatgtggtggtgcatgcctgtaatcccagctactgaggaggctgaggcaggagaattgcctgaacctgggaggcagaggttgcagtgagctgagattgcgccaccacactccagcctgggtgacacagagacttcccgtctcaaaaaaaaaaaatctatggaagtctatattatctttattgaatataataaaaatagatgactaaatgttacagcaactattatcctaaataatgaaacactaaaaccatatcaattcaaaccagaaacaagatactctgtatcggcctaattatttaacattttttagaaggctttagcaattgcaataataaaataattggcatacacattagaaaaagatactcaactatccctatttggtgacagttatgattatttgcataacacgtagagtttaataagggaatttggtaaagtaataggttaatacaagtgtaatcagtagattttctctcctgcaaaacatatatgaaataaacttttaaaacccattcccaatagcaatgaaaataataaaatatataggaaatatataatcaagaaaggtataatatgtagaaacctatagaataaatggaaaggcttcttgaacagaaagacttaatataaaaatatcagttctccaaaaattaataaaattaataaatttaattaataaataaatttaagttcttattagaattccaagagaatcaggataaaaagaactgaataaatttgtcttaagtttacatgaaaaataaaggcacaaaaataccgaaggaagctatgaaagttaacagcgagggaaaacttaaaaatactgggtatcagaatatgctataaagacactgtaatatactatttagaaataggaatagacaaatagatcgatagaacagaataaagaataaaaaaaaacaaatctcatatactttgagatctatttatgagaatgtagtatggccaagattcaattcagctggaaatggagggggttatttaataagtggtacagaactggctactgatcttaaagaaaataaaaatgctcctccactcatactctatttaaacattaatttcaaaaaaatgaatttcacatggatcaatggcctaaatgaaagaaagcaataaaatcttgccagataatccagaagactacatctacaaactgaagcaaaaagacaagactttgtaaccaggactatgaaaagaaagacacatatttgatgacctaaatatgaaaaattatttgaatggcaaaagtattatgaaacaaccttaatagacaaatgattaaaaatctagaaaaatacaattgaaaaataaaggattagtgtgtgtattacaaggaactcttaaaatttttaatcaaaagatagtagaaaagaggcagataaaggaagaaaaaagtacaaatggtcaaaatattttaaaatgcttatattcacttatcaggaaaattcaaattaaagggaaaatgtgatatcattaacaaaaagagctaaaacacttattcctggcaggaatgttgtgctcttgtgctcttatacatggctgtaatggaatgtgagccactttgctatacatggctataatggaatgtgagccactttggaaaatctgacaacattgatcatacacatagacacacacagatacacatatatgtgcacacacatgcatacataacatacatacatatatactttgacccacctggagtcaattcaattcttacaaatctatcctataaaggtaaaaattaatacataaggacttctgtactggacttgtttttagtagcagaaaaaagtatgtttacatatacacgtatatatatacatatatatacatatgtatatatgtatgtacatactgaaacaaaattgatgtctgtaataaggaaatggctaaaaaattagcatatctatatactatggagtattattcagttattaaaaagaataaatcagaactataccttttcagaagacctggaggaattttcttgagataatgttgagtaaagatggtaagatgcagcaaagtatataataaaacaattagtaaaagaaaaaactgtaaaaattattacatatatttatatatgttatacatataaatgtatgagaattatgtcagcagaggtttgcataaatatgaagaaaatatgaaaggctgcacaccaggttgtttataaggcagggaagaattgcaggatggggaggggcaatggagaaccaagcacaaaaggaaaagatttttaattttttttgttttatttaatttccaatgtgatcatattttcattttattttttaaaagacaaggtgtaatcatatttgtgctaaacatataaaaattgtatttgtgttatataaatatataaagctggattcagtgacacaaaagggattttaatgtttttagaccaatcactgtttggagttcttttccccttgagaaactggtaacttttgtttttgcagttgtgagctgaacatcatttagcaaagttaagtgaacgcagcataattagtcaactcctacttataattattcttccattagaattatttctgattttaatagtaaaattatttattttagaaaatctggaaattatagaaaagtagtaaaaaaaactttatttaaaaagcaccagtattcctactacccagagataagcactacagtactaagattttagagtataccatttatgctacttgtgttttgtttttcaatgaaatttaaaatgtaaatcttgtaaatgttgcatattttagttaaaaatatgtgcctatgcttgaattttttaaaaatatgtaaaatccatttgagaactatgtcatttttttctgtaaaccctaccattttcttagtcattcagtatacatacctactattcttttctagttcctggcagacatggaaaataatgtactttttcgggatgatatagaatgtcagaaactcattatggaagcaatgaagtaccatttattaccagagagacgacccatgttacaaagtcctcggacaaaacctaggaagtcaactgttggtacattatttgcagttgggggaatggattcaacaaaaggtatcaaataatcttttatttggggagggaggaccagagaaaaagatattttaataagtgtatatatggccaaagaactctttggagaaatggctggctgcaggacaggggcagaaaaagtaccagataattgtgtaacatcctctaggccagaaaataaggaagtgctcaaagaatgatggagataggtcaaaagacacaggaaacagcttgcaggggctactactgtacaaatctgggataatttgagcatcaaaataaataatagtaaaatattataacctatgaaatcagtaagtttccacggttccacacctatacaaataaacaagggagaaaggaaagctcttccttacagaagaatgccaacgaatgaatatagaaggaaagatgagattacaaaagttaccatttagtaaccaccaataaccaattcagtcaagaattatcagcggatgctgagactagtgggaaaagtttgagaacaagatagtctaaaagtgtctctcagccacatgtttactagttacaaagagtaaaatagtgtatttacagtagaaaaacctggcacacagcacttaagcaaacgatcaaagataatgttgacagaaatcagactaagcagcagcattgtgcaagataggttgcacggagaacttagccgcccatctatgccgtccttgccaggagcatataacctgaatctaatcatgaggaggaaacaaatctaagttgagagacagtctacaaaataacttatctgtctatagtattcaaaaatgtcagtgtcatgaaatataaaaaagattcagaaattgttccagattataggagactaaagagacatgacagctattataatgcatcatcttggattttcttttgctgtaaaggacgtaactgagacaaatgataaaatccaaacaaggtctgtagattagataataacattgtataaatgttaatttcaggccagctactgtggctcacgcctgtaatcttagcactttgggaggccgaggtgggtggattgcttaaggtcaggagtttaagaccagcatgggcaatatggtgaaaccccatctctatcaaaaatacaaaaaaattagcccaacaatggtggtgcatgcctgtagtcccagctacacgtgggaggctgaggcaggaggatcacctgaggccaggaaacagaggttgcagtgagccgagattgcaccactgcactccagcctgggtgacagagcaagaatccatctcaaaaaaaaaaaaaaaaagttaatttccagattttgattattgtattttggtcttataatttctcattttgaggaagatacactgagtattaggggtataatgccatcatttctgcaagttactgtttttttgttttttttgttttgagatagagtcttgttctgtcacccaggctgaagtgcagtgatgctatctcagctcactgcaacctctgcctcccaggttcaaacaattctcctgcctcagcctcctgagtagctgggactacaggcacatgccaccacacatgcctgactaatttttgtatttttagtagagatggggtttcaccatattggccaggctggtctcaaactcctgacctcaagtgatctgtccgcctcaacctcccaaaatgctgggattacagctatgaaccagcgcaccgggccacaacttttttttttgagatggagtctcgctctatcacccaggctggagtgcagtggcatgatctcggctcactgcaagctccgcctcctgggttcacaccattctcctgcctcagcctcccgagtagctgggactacaggcacctgccaccatgccccgctaatttttttgtacttttagtagagatggggtttcaccacgtcagccaggatggtcttgatctcctgacctcgtgatctgccctcctcggccttccaaagtgctggcattacaggcatgagccacagtgcccggccacaacttactcttaaaacagttcaggaaaaaaaaaatacctacatagcaaatacagtaaaaagtaaacatttgggaaaactgggtcaaaggaatcttaagaattctttgtaccactctcacaagttattattaatattaaaaataggccaggattatgcctgtaatccctgcactttgggaggccaaggcgggtggatcacttgaggtcgggaggttgagaccagcctggccaacatggcgaaaccccatctctactaaaaaataccaaaaaaaattagccaggcatggtggcaggtgcctgtaatcccagctactcaggtggctgaggcaggagaaccacttgaacccgggaggtggaggttgcagtgagctgaaatcataccactgtaccccagcctgggcaacagagcaagagtctgtctcaaaaaaataataatagctaaaaataatagcaataaacactatgcacagtgcctacagggtgtcagtattatgctagaagctttctgtgtgttatccctcaatatgcattgatctcccctttctttgaactcctagtactagcaggcttcaatctcctgacaatctctctgacttctggctacctctctgatgtcagctcattctattaatacttcttccctcactgatgcttttatttcaaccccattggccttttcattcatctaacaggccaaacattttatccatatccaggatattgctttagctgatgctctcactggcatgctctgcccccggatattgaagtacctagcagaaattattcactcaaatctctcaaatgtcagcttaccaaggagcccttccatgaccattcaatagcaacccccgactaccactttctaacctgaataacatataacatagcgctatttatttgtagatgcttaagttttagatataggcctgatgactgcatggtacagaaataaataacttaagataactgattagggttacagtataaatatttcaacattggaaaagattttccattgttcagataatctgcaaatacttattaagtatcatctgtgtacctggaactggtgctagcttttgtagtcattactagcactcttcttctccctctttttctctccttttcaaggctttaactgttatctctatatttatgtataataccctcactttgattttattctcatatttccaacttgtataaaatatctatttgatgctcagcttttaactcaaacttggtacatggaaagggaaggaaacttgccttggtacatggcaaggaaaatgcgtatctgtcttttcagctttctgggagatgagttcctgcttcccatcaaggctcatacatacagtggaaaactccccaagcttgggaaggggactagatactaagcacccaaagtaaacaattctcattctctctctgtctctctggaaccttaaattctgacagtcatcaggtcttttttcaaatgggccttatatctaattcttccaaatttctgctgccatccttctaattccagttagccttctgtcagcctacatattttggtcatgttaatttagagggaatagcattcattatgttgttaatatatggaaggcattatgctaagcacttagcctatattatttcatttcatcttcttaacagttctcttttatagatagggaagctaagacttggagaacttaagcaactttccaaagattagacaactaattagtgataagatcaagattcaaacaggcattttggctttggagatgatactctactccattaactcttcagtgaacatgccattattctgctcaaaaactccagcagtctatttcttaccacataagatgcaaatgcctcatttaagactttctctaatctggcccttctgtttgaccaactttatttctgagtttttttagtgattaaatattctgacctatcctgttcaagctatctgcctggccctaatttatcttatttcccatctttgtaatgaagagcagtttgccttagtcggttggtagtctgaccattggactcttggtcccttcatatatctgtttagtatagggccaaacaaatcagctaatacgggctccaaatagccactgtgaaaatgttagagtatatttgtgcttacttttataaaaggttaattatttggtataaattagggaagtcccaagcatttacataaaattttataattattaggattttgttaattttggatatttggattttatatatatatatatatatatctacctgagactgtgttttaatatctttatgtttgaaattagcaaaataacttttagttaccaattcatatgaatatgatactgcttagtaaactagatctaaaagaaataacttaaaattcaaaagaaaagtattccctaaatgtattcatgaagaaagatgattagctttttatttgttggagggaattttctaatttgatttgatttatttaatggaagggataatattttaagatcaaatttagagtaattaaatatactattactatgtatgttactattataatgtaagcatatgagtaaaaaacctcactatagctagaaactataaagaaaaagtattcaaacatatttttcaacagctgtactaagtataagggactctgtttggtgctgtgaaaaatacagaggtaaaggccgggcaaaatggctcatgcctgtaatcccagcactttgggaggccaaggcgggaggatcacttgaggccaggagttcgagaccagcctggccaatacagcaaaaccctgtttctactaaaaatacaaaatattagttgggagtggtggtacatacctgtaatcccggtttgggaggctgaggcacaagaattgcttgaacttgggaggtggaggttgtggtgagccgagatcataccactgcactccagcctgggtgataaagcaacagtctgtctcaaaaaaaaaaaaaaatatatatatatatatatacacacacacacacacacatatacacacacacacatatatatatacatatatacacacatatatacacacatatatatacacacacatatatatgtatacatatatatatatatatgcatgcagaggtagaaaaagacttgtctatcccaaataatttagaattctgtagggtaaataaaaaataataaaaactataacacgagaaaatctatatgtataacacaactatttctaaattttaggaagttatcaataatactagtgctctgatgaccaaattataacaaatactttagaataagtgttagtcaagattataattctataaggctagcgcggcttacatgatgtattagaagcttagaagagagaagtgggttctagttgaactcttcacaattgggggttaggtttttttagagggttttgttttttttgtttttttaaacatctgctcatcttaactcataaagagaacaaaggagtcctggaatcttccaattcttaaaaaaaaaaaaaaagaaaagaaaaacatagatgccttcaggcagcaacttcctgaactccctaccgtcatagttcccaaagtacccgatccgtacttaccccgcccttgcttattgcagtagaatatgttccctcctcccgtgaaagacagctcttctgcctatgccctggatactgtgctttcctgcctccccacgaaccataatgaacatggttcattatgttcgttatgatccctttcatctcctgtatttttagctgctttcctctcaaccagatccttttcattcacatttaagcaaactctgagttttcaaattttcaaagcaaaacaaaacaaaaccttcctcaactcttctagtaatttctatctctccttactttgatagccagacttctcagaagaatcttctatgctcactgtgtttcttcatctcccagtcacgtctcaaccactcaataaggaacctccccctgaagtcatcagtgacctctgtgtggctaaatccaataatacttctgagtcttcatcttatttgatcctttcagtaggatactgttagcagacctactgctataaactttcttcctttggcttccatgacacttaacgcctctgcttttttctcccccgcttctgggtgttgtttctcaccctcctttgacagttaatccttgtccatttgaccttttcttactggggcctgtgtatgccctggagaatagtaggagatgaggacacagaggtaggcagaggctagatcatgcaggaccttcatgaaatataataaaattattattctcaatgctaataagattatatttttgtatctgtaatttcataaaattaccaatcatggtataatttctatttacataacttctatatattactatgaaggagcaacaagcattgaaaagtatgatctccgtacaaatatgtggactccagtagcaaatatgaatgggaggaggctacagttcggtgttgcagtgctagatgacaaactgtatgtggttggaggaagagatggactgaagactttgaatactgtagagtgctacaaccccaaaacaaaaacttggagtgtgatgccacctatgtccacacatagacatggccttggtaagtacaactatgcagattcactcaaaatatcacatagctcccacggcacatttacattctgaaccaggcagaggacccgtgtggcagccactgcgtcagcagcagtcaccaagcattcctcacatgctgcaataaagaatttggtaggtcatcataaaagatgaggccggatgcagtggctcatgcctataatcccagcaatttgggaggccaaagcaggaggattgcttgagcctaggagttcaagaccatcctgggcaacataggaaaaaagtctctacaaaaaatttaaaaattagctgggaaattttttttttttaattaaaaaatttggtggcttggcctatagtcccagctactcaggaggctgaggagggagaatcatttgagcctgggaggtcaaggctgcagtgagctgtgattgtgccactgtactccagcctggcaaaacatctatctcaaaaaaaaaaaaaaaaaaaaggatcaataccagtgaaggtatggttgagtttagatagtatggtttatacaatactcaatttattaataccaccagagtagaggcttcccccaaataacaatagagagtaatgaaaactctctagggatgaagattgaaatgggaatggtggtgggtacagtaaaagatcaaagagacatagatttccactagttgtaattagttctcagtgaaagatgattttaagtttgataaggaaataaaaccagagggttaaggcaaagacacagagaaggagcttaaaattaactatatgaaatttaacacagtaaacttgtaaaacattactcctgagtccataaaatcaactattatataggcacagactgggaaaatgtgagttaagcatgaatgagacttagaaatttgggttgaccataaaatccagggtaaatagagtgagtcaactgcgtgcttcccctcccctaccatggggaagaaaatataattctaacacaggctaaatccttatggatatagtacatagaatgtgattgctcatagtccagctgtttcgtgcagatgacattgtgcattgaatactgtcattagttctaggtgccatacaaaagactttattgaactgcagcaagttgaaaggaaaatgatcacatagctcaaaactgtcttctttaagccctaatttaaaatttttgtgtcattcaaagcagcaatgttcttattaagttaccttataattaaataactgttacaaatttgaacttaagaaataaacttttttttttttttgagacggagtctcgttctgttgccaggctgaagtgcagtggcacaatctcggctcactgcaacttccgcctcccgggttcaagtgattcccctgcctcagcctccctagtagctgggactacaggcatgtgccaccacgcccagctaatttttgtatttccagtagagacacgtttcaccatgttgtccaggatggtctcgatctcttgacctcgtaatctacccaactcagcctcccaaagtgctgggattacaggcatgagccaccacgcctggcctaaaataaacttttaagaaacattccttttatctcttcatatgtggtaattatatgaaaatttcatttaaaaaaggagttctgctaaattttttttttttttgagacaggttcttgctctgtcacctaggctggaatgcagtggtatgtttttggctcactgcaacctcttcctcctgggctaaagcagtcctcccacctcagcctctctagtagctaggactataggcatgcaccatcacacctggctaattttttaatttttggtggagacagggtttcactatgttacccaggctgatctcaaactcctgggctcaagcaacctgcctgcctcagcctctcaaagtgctaggattatacttgcgagccactgcaccaggcttaaaatttattttcaaagtcattttttaatgggttgaattaggtgaaccccttaagttttctgccccctttgacatattatgcattacatatatatgtatatatgtaaaattagagatatacatatatcataaacatgtatatacagtatgtgtatatattatatatgtatattttaatgtgtatttatatgtttatatatatacacatataaaatgtgtatatgcacatatatacatataaataacatgcatgcatatttatatacacatatatgtgtgtatatatgtatacacacacacacacacacacacacacacacacacacataaaatctccaaaagctagtactggtggggcacaatatataacatatgagtggaacaatctgttgatttggatcatgcatgaatgatgagtatttttcttatctggctgtgatttcacaaattaaaatatatctgtaatacaggggttcttttggcccccaagtgacatattttatctcacctggccatgatcatgtcgcacctcttctcaaatccctctacctcaaagccatctcaaagccatcatggagaccgttctccatctcattcagaataagatccgaagtccttacaagagataagatcagagtccttatctgcagtctctgactgtcctgcatgatctggctccacactctcccccatctcttacatttccccctcactcaccctgcctagccagactggccaccttgttgtcccttagacacagtgagcatacctcaggacctttgcacgtgccgtttcctctgcctcaccttctctttccccagctatctccaaatctggtttcccaacttcattcacattcctgcttaaatgttaccttatcagaaaggtctcccctgaccctctctatccttttactctgcaccactttttaaattagcacttgttattacctaaaatatattttatgtctatttcctgactataagatttatgagggcacagcccttacccgttatattctattgagtgcccggtacttagtagacatgcagtaggtatttgttgaataaattaacaaatgagtctagctcagctccgtgctgatgaatcataccaatagattatggtatcaaatctaactatagtaaaatctcatgaatttgaattaacaggggggaaggtataaaaatacttttccaaatatatcttaaatccaaattgttgaaaaatgttttaaatagtagcaatgtatgcatctggtgcagttttaaaataattttccactgttgtacctaaaaatattgcctctaaaacttttaattttttttagagacagcgtctcactctgtcatccgggctggaggtgtgatcatagctcaatgcaacctgaaactcctgagttcaggggatctttcaccttggctaagactataggtgatgccatcacgcctggctaattaaaaaaaaaaaaaatttgtagagatggcactcttgctgtgttgcccaggctgacctcagaagagatccttccaccttggcctctcagagctctgggattacaggcttgagccaccgttcccagcctctagaacttttttttttctttttttttttttttgagacggagtctcactctgttgcccaggctgaagtgcagcagcatgatcttggctcactgctacctctgcccccaaggctcaagcgatcctcctgcctcagcctcccaagtagctgggattacaggtgcccgccaccatgcctggctaatttttgtatttttagtagagaagaggttttgccatattggccaggctggtctcaaactcctgacctcaagtgatcctcccacctgggactcccaaaccgctgagattacaggcataagtcaccgtgcctgggcagtctctagaacttttaaaccagaactaccgtgctatttcaacccacccacccacccaccgacctactaagaatagtgaggaggacacttgtctgcatcataaatgtttactcagttctatttgtatgtttaaggcttattgtacttatacttcaattaaaatgtgatttttaagacagcagccaatctgaagtcgttaattgtttcctgtctcctcataggtgtggctgtactggaaggtcccatgtatgccgtaggaggacatgatggctggagctatctgaacacagtggaaagatgggaccctcaggctcgccagtggaattttgttgccactatgtctacccctaggagtacagtaggtgtggcagtactaagtggaaagtaaggaaatatttaaagttccatttaaaatgcaatacaccaaatttattaagctatatcatttctaatttaaagatatacataaatacttacagtgatttgaagaaacttttaaaacaatgtctctttctataatagttgtaaatatattgttttaatagttgttaagctaggctttcattttaatgtgcagatactatacatttttagttatcattttgagtgaagacattttatattaatgttcaatattaataagttgtactataaaaatctggtatatctatattaaaataatataatttaaaagtatattatctatattatgtttaaaagtatatatggtcttttaaaagtagtgtagtctttctcagtgtttctctaaaaattccttccatcttttctactgatttatcttgacttttacctcttttctttcttatcttggaaaactggtgaaaactagaatggatttataaagaggtactctcttacctcttgtctgctctgaataaacaaatataggtagagccatcactaatagctctcagttactcagagagtaaatattttttcagtcctttcttcttccataaaatgaagctgtctgtggttgttaaagaaagttatttgtggggtaccttttgctcatttagaatgctttatcattgtttccagaaaaagaaatgaatcaaggttaaaatagaattaaaattatgtatagaattgtgttattgattattataagaaaaatgaaaaaaatagtgaaattttttatattttaggacctaagatcttgtttcttcaggacctgtcagttatgttctattttttgatactttttgtaagcactattacatgtgataagatggataaatggaaatcactttttagatgttttttatctccatgcccctcccctcatttattttagctaaagaaatcacttcaaagttcatcactaggtatctttctaaactctttggtaagagtcagccattaaagaatctagtaaatgagaaaaaaagaaaatgaaacagtatcttcttggttttgaccctttggtttaaacctttgggattgattcattggattaatttttgttcagcaacatatttcttagcccttatttctaatagaggacaaaagaataactgccttctctaaaacctgatttccggacctaccgtagcttagatttctaggcatagaaacatcttacttacttaccttttcttgccctctaatgagaaatatttcaatccttaacccacctaaagtacagttaattgaatataattcagagacaacctaattaatcatatcagaagctaaggatctctaatctactaactattaagaaatttgattttgaatgtatagtataactaaagaatctggagtaagtagaaagtatgcggttggttgaaaaaaaccaacgatgcatcttttcttatcattgctttgtgatttagaacaaatcatttctctgtgcctcaatttttttattctgtaaaatgaagagctttgatttttgtggtttttgttactttaacttattacttatttatttctttattttgagagagagtctcactctgtcgcccaggctggagtgcagtggcatgatctcggcacactgcagcctcctctgcctcccaggttcaagcggttctcctgcttcagcctcccaagtagctgggactacaggtgtgcactaccatgtccagctaatttttgtatattttgtagagacggggtttcaccatgttggccaggctggtctcgaactcctgacctcaggtgatccacccaccttggcctccctaagtgctgggattacaggcatgagccactgcacctggcctattttaacttatttataatttctttttctttttttttcttttttttttttttggagggggtggtggggaagtggacagactcttgctctatctcccaggctagagggcagtgggcaatctcagctcactgcaccctccacctcctgggttcaagtgattctcctgcctcagcctcctgagttccagtgattctcctgcctcagcctcccaagtatctgggattataggcacctgccaccatgcccagataatttttgtattcttaatagagacagggttatttaccatgtcggccaggctggtctcaaactcctgacctcaagtgatcagcccaccttggcctcccaaatcttaaaatttttaaggtgttaaaatttttcttcctaccatgtttgacagaaagaaaccttatttagacttccaattgctcaggctacctttaagccactggctggcaaatatttttagcagttgaatctctctttcaaatgaaatcttaaaaatacctcaacatttaaaaggcaaatggaagttcaagtttattttaaacttatttaaaatgtattacaagttcaagcatatcatatttacttattataaaaatctgtgaagaagagtaagtgctgaagaacagaagaataaactttaaagaacacagcttatttctgtgttttgtcttgattgtctaatatgaggaaaatcttgatccacagataagaggctgaaatggtaacagttattttaactactagagtaatttaattggaatttcaggaaattcttcagttaaattgcccagtttgaaagtagtaataattttttttctaagttgaatctcaaacagtatctgccaattacttgcattccttttacttttgagacagggtctagctctgtcgcccaggctggagtgcagtgacacaattacagctcactgcagcctcaacctccctcccaggctcaagctatcctcacacctcagcctcctgagtagctgggactacaggcatacaccaccatgcctggctaattttaaaaaaaatttttttgtagagatgggatctcactgtgctgcccaggttggtctcaaatacctgggcctaagtaattctcccatcttggcctcccaatgtgctgggattacaggtgtgagccaccgtgcccagcctacttgcattcttgatcataattttaaaagtcaggcaagacctaaatcttattattaagtatatataggtagtacaatactttcacaacttgacataatatttctctttttattgtaatagacactatcgtggtgaagagagatgagttctgagtcttacatggcatttaattgagccaggtgatatttttgaaaattaaaaataatttttaaaatttgaaattcaaatgaaccattttttagactccctcaatttcttcatagagtcctattcttagaacacagcttgaaaatcattgcttgagataatgattatttaggaagtgttaccaattggttttaacccttaatattagctgaatataaacattgtttgtacacttaagatctcctgtaagtgctattttctacaagaacacagagacgtaattaatttttctctgtaaatgtttatgccatgattatcatgtactaggcagtgttcaaagtactttaaatttaattattaagcatcctgtgaggcaggatttatagatgatgaaattcagttggaggttaaataacttgtccatagtcacactagtaagtggtagaaccagaatgcaaacccacagattctggttccagagttcatgctcttaatcattgtactatgccattctttacaataaagtcccacgaatccactgttcaagagggtaagatgctttaaagcctattgtgtgtgggtatgtgtgggtgtgcacacgtgtgcacacacatatgcatgtgtgaattattttaaatcattgatattccttaattgttaaaggcttctcatgttctgtgatccatacttagataactcttctaccaagtattagttgatgataagaataatattaagaactagaacataaacaagttactaatagataaaagtttttaacagataaaaagttttatgataaattttaatagataagtttcaaataaatttcaatttccatactattaatatagtttaagtttagaacaagatattgctataaccatatgttgctgtttaagatatggtcatcttattatttaagaaacagtttcagtgacatagtggcataccttaattaggaaatctgtggttaagtatgtagatttacccaaatataaataactagagttttaattggcagaaatttgggatacttaaaatattatttcttgagaaatgataaaaacagttaagtattaactaacatttgtaaattcaaaatgtataatcttttctatgagcaacaacgtaaatttactcttttaaaaaactagtagaaaaaatatttatggaaagcttcccaaatgaatagtaagtacaagaagatttttgcttaacaagaaatattgtgttcaaatatttaaaatattttacaaacttttaggttcagagtaaaagactttcaaattagtgcagtgtattgattgataatgaatttaaattgatctactaggtaacatttaggttgctcacatgataacctatatccttttctgcagtaatttaaattaatgaaggatcattgttcatacataacaaatgttactttttatgccattgtttcaagctatatttttattctcctatttcactattacaagtacattctacatgactgtgttgactgtccaactgttcattaatgaaactatgtgtcccaattctgctgcttactgggtgaccctgtgcaagtctcttactctctgtgaacccttgtttctttacactgtgaaacagggattcaaacagtttctcatatcactgtgatgattaaatcggtacatgtgaagtgcctaacctatggtaggtgctcagagaaggttagcttctttccttgataataaagtcttaactattaaaaaaaaagccatggtatatttatacaccatattttgtctattctaagacatattttaacacctctgaatttccatgcatattacaaccaatggtgacttgtcaaagagatggcagtgatgaaacagttgtcactgccttcatgtgcagtttgttttccttttcatgtatatacagagtgatatatgatacttacatgtgtcatttcaaacatagcatacttttttaatgacacacacattgacagtgtgttttataactgatggcaccttaaattcaatgagataacaacataagaagagcctctttgttctaagcataatggcacatgtcttatttatcatttcatatattctttttgcagactttatgcagttggtggtcgtgatggaagttcttgtctcaaatcagtagaatgttttgatcctcatactaataagtggacactgtgtgcacagatgtcaaaaaggagaggtggcgtaggagtgacgacctggaatggactgctgtatgctataggggggcacgatgctcccgcatccaacttgacttccagactctcagactgtgtggaaaggtaatttcctgggaagaaaaactaggaacaaaaaagatatatataagtctctgatacttacatatatttggagaacgtgttggagaattggaagggaaagtcggcattcaaaaatgcaaagcaacttcactttataacagcctgctctcacaggaagtgatacttccagaaaaataagtttgtattgagcatgcactacatgcaaggcaattttattttatatgggatattggacctaataagaagaggagcttgatgaattttaggcagaatgacttaagggctgtagactaaataaaaagcaaaaaggatagggacatttctatgtgttttgatatgaaataaaaaactaataataaggcttacaaacgtaagtcatcccaactggcctcacaaaactcaagtgtggtgccaggtagagagccaaatagcagtggaagatttggatggtaggtcaggttcccatttattatgtttagtctagtacaaggaatagagagaattgaatggatttaggtggtacaatcaataggagcttgtctgaacactccaaagcagaaagaaatactgaaaggcagccattgtggctgaagagcaaagagtgatggggagggaaaggcaggaaaggaggcggagtgggcagggtggtgcagatcatctagactccttgagacattgttaagggttttggactataaagaaaaataggaagttaatgagtgcccatgtgtgacagagagtgtgtgtgtgtgtttgtgtctgttggatgtgatcagatttttttaaagattagtttgatgtatttaagttgtaagtgaccaagtgaccataagaaggataaaaagtaaaatcaaagtttgttgatgataatgagcactatcttagtctgtttcccattgctataacagaatatccaggactgattaatttataaagaaaagaggtttatttagcccacagttctccaggctgggaagttcaagattgggaggctgcatctggcaggttctggtgagggccttgtgctgtgtgataacatgttggagaattggaagggaaagtcggcattcaaaaatgcaaagcaacttcactttataacagtctgctctcacaggaactaatgcattcacacaagaactaaccaaggagaaaaacactaatccatcttatcaacctgatcacctcttaaaggccccacctcccaacactattacattggcaattaaatttcaacgttgagttttggtggggatgaaccacatccaaaccataacaagtgctttctgtattggtgttgtttgagaaagcaggaaagttacaactgcatttcactatattggggggaaaacaattgagacctatgctcgttgcatgttgtaatccaggaaaggaatgtggaagtgtttatatacttggccccatgaattatgggcttgctgttgtactacactcagtggaaagctgttcattgatacaacagattttaggggcagtatcagtcatcttagcatgatgtatctgctcttagctatacaactttgggcaattctagttaagacacctcatgaaaagagcaagacagcccaaaaatggacagctacaatgattgagggtgtaagtcatcttacacagagcttaatgcattgctttccccaaattttcggtaggtaatctaaggtctgaaagcagtcttcagtattgacactagctccttttaagtgttatacatctgttaagtggatctattaatataatactgtaagttaaagttttcagagaaatactgatatttttctctaaaatatgttcaaatgtatttgattacatagtagataatgagtcagaagatagacttgaagaacaaaactgtttttacataaatattttaagaataatgtcagctccggttctaaaattttcttacagatatgatcccaaaacagacatgtggactgcagtagcatccatgagcatcagcagagatgcagtgggggtctgtttacttggtgataagttatatgctgttggggggtatgatggacaggcataccttaatactgtggaggcttatgatccccagacaaatgagtggacccaggtatggcattcatgtttcattattacactgactctctttttattaaaacaattcttatggtaaaacagatcccctcaatcttgtccaatactgaaatatatggcataaatatgacaatcacgttttgattagcgatgagaaaaagaggcaatgtttaattttataacataattaaaatccagaattacctttgagatgtaagttaatactcagagaaattattaattatctgctaccacttgcatgatgaagtgttctagcctgattaaagctgataggactactggagggctgcaacaatgggaggggagactggaaaataaaaacaaggatagtagtcagaaaactttgaacaacttgcccatgtgtgagcagtcggatttttaaatactcaacccattgatatctgggagcagattaaagtcctgataacctaatgaagatggcaaccctaaattacactgagtaagaaacctgatctggcagtcttactaacagaaagaatttcacccttgtgtatttctgggagggtctagcacttctaaaaatgatcttttgagatctttgcttccatcatcaccaagaacagaatcaggaatttgtgcttgtgtcacccagttcagtacttggtacataaaagacaataaatgtttaactgagccaagattttcttgtatacaaggagccatgataagtatggtcaagaaaacaaagcttctaggccaggcatggtggcttatgcctataatcccagcactttgggaggctgaggcgggcagatcacgaggtcaggagttcaagaccagcctgaccaatatggtgagaccccatctctactaaaaatacaaaaaaattagccgggcatggtggcacgtgcctgtaatcccagctactcggggggctgaggcaggagaatcgcttgaacccaggaggcagaggttgcagtgagcagagatcatgccactgcacttcagcctgggtgacagagtgagactccatcttaaaaaaaagaaaagaaaagaaagcttctgagaagacccatggtcatgtaacctgaggtcttgggtaggtaagatctacatgtgcaagaggagaatgcaccacacaaggcagtgggtatttagtgtcccatggtacaggcgccaagtgatacgggagataagagagaaaaaagaaagtggttatggggaaagctttagtgagaatgaagggggatttaaaccaagccttagtgaattgatccaattcaaaaagattggaaagaagaaattgtgagaaaatgtgaaagaaatgtcaccaaagcagaattgtgtaatacgtattgaagtatgactggttataggatctgtgcttgagaggagaaggagtgcttactggagaggaagattggggtcagaatggagatctgtgagaccaaagtgggaggatcgcttgaggccaggaattccagaccagcatgggtgacaaagtgaggcgccatctctgcaaaaatttgtgggtttttttgttttggttttgtttttcagacagagtcttgctctcgtcacctaggctggagtgcaatggcacgatctcagctcactgcaaccttcacctcccgcattcaagagattcccctgcctcagcctccccagtagctgggattacaggtgcccgccaccacacccagctaatttttctatttttagtagagacggggttttgtcatgttggccaggctggtctcaaactcctgacctcgtgatccacccaccttggcctctcaaagtgctgggattacaggcatgagccaccatgcccagcccccaaaattttgaaaaattagcaaggtgtggtggcacgcacctgtagtcctatctacttgggaggctgaggcggaagatcgcttgagcccaggagttgaggctgaagtgaaccatgatcatgacactgcactccagcctggacaacagagcaagactctgtctcttaaaaataatcatataataatgattttttaaaagaatggggatgtgtgaaggccaagctaaagagtttggtaacaagaagccagcagaaactttcaaccaagagaatgatgcagttggggtcgcataggttgggttaggggcaggggaagtgagggctggataaaaggaaaagtatttagaggattgcttcagttgcaaggcttgaagcattcaatgtagatggattcaagagatattgccaggtcttgttgatctttctttatatacacacacttactgggttgaattgggaggtgtggtctctgaagaaaacaggaaaggaatgatgagagaagttctcagaagacaatggaatagagcatctaaagggaggagtaaggagtttcaacagtgtaagaaagaatgaagatttgtcatttttaaagttgtgggaccctctgaaaatctgatagaagcagaagccagcacacagtttcaaaagtaaacagaagaggccaggtacggtggctcacacctgtaatcccaacactttgggaggccaaggtcggcggatcttttggggccaggagttcgagaccagcatggccgacatggtgaaaccctgtctctactaaaaatacaaaaattaatgctcctgtagtcccagctgaggcacaaggctgaggcaaaagaatcgcttgaactcaggaggtggagattgcagtgagccaagatcgtgccactgcactctagcctgggtgacagagcgagactccatctaaaaaaaaaaaaaaaaagtaaacagaagaatagagtgtaggagctagagaggcatgcagtttttaaatgatgatgatagaaagttagtatttattgagcatatcttacaggccaggctctgttctaagcactgtaaagaatttaatcttcaacaaccctataaggttgagttctggtattttcgcactgtacaggatgaggaatctgacacagaagttaaacagctaacccaaggccacatagcaaataaatggtggagttagaattagagccaaggattttttttttttgctccacaatagagatgacaagaagagggtagagagagattccagatactagaaagaaaaagtgaaactgaagggcacctttctgagaaaagggcaggaaacagaattaagagcaaagactgggggcagggcgcagtggcttatgcctgtaatcccaggactttgggaggccaaggcgggtgggtcacctgaggtcaggagttcatggccagcttggccaacatggtgaaaccccatctctactaaaaatacaaaagttagctgggcgtggtggcgtgcacctataatcccagctacttgggaggctgaggcaggagaatcgcttgaacctgggaggcagaggttgcagtaagccaagatcacgccattgcactccaacctgggtgacaagagcaaaactccctctcaaaaaaaaaaagcagactggtcaccctcagactagaagaaagatcttaccctccaaggcttgggaaaagatgagaatttgagtgtagaaaggtacagggagtttttaagtgaagagaaagagaagaaaaggacttagattgtgtgggctttatcctgtttcttaagtgagatcacttgatggagggaggaagggataagattgagagctacaagatttcattggaaattagatgattacctaatatcagcttcccactatggcaaaaatagttgtgaatgacacccaaggagctcagaaagataagaatctctttttctgacatgtatttaagccctaagtccagttatatatatgatttaagacctatcagccagttatttgagacttgttattatttataattaatgctttatgctaaatcaccccatatcaaaattgatcatcagtgtccacatagctattttgcttgcaagccacctctctatgttaaagcacctaaaaatgtgaactcgttatcatagtgtctgaaaaataaaagttttcctgggccaggcatggtggctcacccctgtaatcccggcactttgggaggccgaagcaggtggtttgcctgagctcaggagttcgagacagcctgggcaacatggtaaagccctgtctctactaaaatacaaaaaattagccaggtatggtggtgtgtgccagtagtcccagctactcaggaggctgcggcatgagaattgcttgaacccaggaggtggaggttgcagtgagccgagatgtgccattgcactccagcctgggtgacagtgcaagactccatctcaaaaacaagccaaacaaacaaaaaaattttgaagttttcctttcagtgttctgacagatggacatttgtataggcactaaaatgagatgacaaagtcctaagccactacccacctcactaccagccttacctcaaagcaagaggtgattgcattgtatttaacaaattctctaagctacactttctagctagttgtcatgacagtgtcagctattcacaatgtagagactaagtgtcttggatgatttgagaagagctactaattataaactgacattttgatataaatgatttttgaggtcagttcgataatgctatcaataagtatggttttaaaataggttgattgttccaagagacttacagtgatcaaaacaactgattcagatggagaactactgagaattctcttataactgaagtctgacctgttcttaaaatctactcattggtctagggggtcgaactgattaggaagtcattttggcatttgacaaaaatactttagtacataccctaacatatataagtacaaagcaaactttcttagtactttgcattactcacccgctgaatccatgttaacattttaactctcctgggtcaaatgcatagattcttactgtgttcagagtaattcttcagaactatttttgtccacacttttatttccactatgaattacccagtgtctagagttcctattgttcaaaaaagaggtgaaagatttaagaattgttctttatccataaatttagattgcattccttcccctagcaaccctcccctgacttctatctcactgtaatagagctcattcactgagtttgtttccactcccaggggagttggatgggtagcatttattatttatttagtctgctaaaaagtagtagaatgggtttagacttttcagccatgcacgtagaaggtagtcaaaaaatgtgaggttatgagttcttctagaataagcagatccccaggcattcagagtattttgtgtgctacctctgagatagcatggctgttagaggacctctctagataacacttgatctttcctccatattggtcacagagttactgtaagtgttcagcatttcttcatatccatactgtgtatcattttggctaaaatagagtgtttcatgtagattaattcttgagctgttttaaaaatcacctttaaagaagaatgaatgctacacaatcatgatgtacccaaaacaacttagtctatgaaactttgccatggaaggtggctcttgggaaggggaccaggccagaaacagcgctgatacagcaggggccagggcaacaaccctttgccaacaagtacaggctgtttcaatatttcaccaactggcatagtagtgttgacattttaacctacagatccaatacatatctctttttcctttttaggttgctccactgtgcctaggaagagctggagcttgtgttgtgactgtaaaattataatttagtgccccgttttctacatgaagacaccgtcttcctttattaatttagtataattattctatcaatggatacatttttagtaaatgtgcattgtcacaatcctgggcacaaagtgcctgatgtcaaaatgaagatagtaaaacaagggaggaagcagtggatggaccaggattaattcctttcatttcttagtaaattaaaacctgcagctggtggattgtgatcacacattcccgaagtaataagtgaggacgaatgcactgctctggaacataacccagtgctaactgggggtttcatttattcagtcaagcacatcttactcacatccagatttattttcctacagtgcaaacacaccagatgaaactttaaaatgttactttttgtaagcttatcataaatgagttgcagtaatttgtttgcttgtttgtttaaccacaaccactattttaatgatatactaaagataacactatttagttttttcagaaacatctgcattatatgtgtgttggttgtggattttgtttctaaaattggcttagtccaataaataaagaaaagcattaaggacttaaagcaacaataaccaaataaaaacttgataggatctttgaagtctatttaaatattcattccattacatctagactcaccaagaactacatgttatgatgttaagttgaagttgaaacatgatgttttgcattaaatttaagatatgcaaatttatgtagagaaaataaatgttatataccctataatctttcacctaattagtatttaattatatggatttgttttatattataaaagatgttttgattttgtcttttgatattgacaaaattgtttggatatccttatgttctcaagtctgtatctgcctcccctgccttatttcttatgttttgccacagttaacccattgtgcttctttgtaatcaaacagtttgtgggagaatgggcttattgaatgtctaaaaaataagtttaaagtgtttgttaccctaagttttttacatttttaaactctaattacatatgtgaatgttattactctcagtgaattgttattgtttgcaaaaatgcactgggcagtaacattttgtgataaatcctataagatataagtcattgagatgtctaagatgctttttattttaaccccagttaataaccaccttacggaaaataatatttgctaatattgtttattgtgaactaggaatcaaagtttttgtatgcatcaatgcacttaatccttataacaaccttatgaggtagttctattccctttttatagctaaggaaattggggtacagagaagttagccccaaggttatatattgcaagtaagtggcagagcagggattcatacaaagaccttctcactcagcagtcttcactcttactattcctgccactaggtagaaaaagaaagatttcggccgggcacagtggctcacgcctataattcccagcactttgggaggctgaggtgggcggatcacgaggtcaggagatggagaccatcctggctaacacagtgaaaccccgtctctactaaaaataaaaaataaaaaaaaattagccaggcgtggtggcgggtgcctgtacgcccagctactcgggaggctgaggcgggagaatggcgtgaacccaggaggaggagcttgcagtgtgccaagatcgcaccactgcactccagcctgggtgacagagcgagactccatcaaaaaaaaataaataaaaaaaaaataaaagatttcattttatgtgaggaattattttaataaaaaaaagagggtttatgctctatagtaataaaatttaccagtaacacccaatcagaaaattttggttccttagtatttagggaagacttttgtttaaatctcttatggaattttacatgttttgatttagaaaagtagatgcaatataatatatttcaagttttatacatattagatgaattgcatggtattttaggcaacttaactataaacaaatttattcatagaagcattgttgccaacaatttagatgacctcgatgaaaaaacacaccaattgacaaaactggctcaaaaggaaataaaaaatccaaacagacctgtaacaagtaaagagattgaaccagtaatcaaaaatctcccaacaaagaaagtccaggactaaatgagtttactggcaaactatgccaaacatataaagaagaattaacactaatccttctcgaactctcccaaaaaatggaagagaaaggagcaccctgtgacattctataaggcggacattaccttaacaccaaagccagacaaagacctcacagggaagctacagaccaatatcccttatgaatatagatgcaaaaaaacttcaaaatactagcaggccaaatccagcagcttattaaaatgatcacacagcatgaccaagtgagatttatcaaagaaatgcagggatggttctacatacaaatgtcaatcgatgtaataatataccatattaatagaatgaaggggaaaaaacagcatgatcacctcaattgataagaaaaagcatttgacaaaaatccaacaccctttcatggtaaaaacactctgcaaactaggaagaaaagggaactttcttaacctgataaagacatccataaaaacccacagctaacaacataatagcaaaacattgaaaatttttcccctaatatcatgaaaattcctgatttccccactgctattcaacattatactagaaggtctagccagagcaattaggcaagaaaaagaaataaaatgaatcccaaataggaagaagtaaaactacatttgcagaaaacatggtcctatatattaaaaatcctaaagaatccacaaaatgattccggctgattttaaaaattcagcaatgttgcaggttgcaagatcaacacacaaaagtctaagaaaaacctgaggggaaattaaaacaatttcatttacaataacatgaaaaagaataaaatacttagaaataaatttgaccaagaaagtgcaagacttggacactgaaaagtacaaaacgttgctgaaagaaattaaagaagacctaaataaatggaagacatcctgtgctggcaggttggaagacttaacattgttaagatggcattactcccaaaattagtctatagatttaatacaatccccattaaaattccagtgacccttttacagaaactgaaaagctgaccctagaatttatatgggattgcaagttactgaaggtactcaagtctgttcaaaacaatcttgaacaagaataaagttgaaggactcacattttccaatttcaaaatttactgcaaagctacttcaatcaaaacagtgttgtgctggtataaaaatatataaagcaatagagtagaatggaaagtccagaaacaaattacgccaatacactatggtcaattgatttttgacaagggttccaggaccattcaatgaagaaagaacagtgtcttcaactaatagtgctaagacaagtgaatattcacatgcaaaagaatgaatttgtacctgtacttcataccatatataaaaattaattcaaaatagatcaaagacctaaatgtaagagctaaaaccataaaactttgagaagaaaatacaggaataaatcttcatgaccttggatttggcaatggtttcttagatatggcaccaaaagcacaagcaacaacagcaaaaaaaaaaaaaaaaaaaaaaaatcaaaattaaaagcttctacatatcaagggacactatgaagaaagtgaaaagacaacccacagaatgggagaaaatatttgtaaatcttacatatctggtaaggaactaatacctagaatatataaggaactccgatgctcgacaacaaaaagacaaaccaattttaaaatgggcaaaggacttaaatagacatttctctaatgaagatatacaaatggccgacaagcacatggaaagcactcaacctcatcagtcattatgcaaatcagcgccacaagaagataccacttcacacctattagaatgacgaaatagacctaggatctaaacctacaggaaaaaaaatgaataatagagaaaataaatgttagagaggatgtggagaaattgaaaaccttcattcgttgttggtgggaatgttaaatggtgtagccactgtggaaaacagtttggcagttcctcaataagttaaaaaaaagaattaccatatgacccagcaagtccactcctgggcatatactgaaaagaactgaaaacaggtgttcaagcaaaaactttcacgcaaatattcattgcagcactagtcacagtagccaaaaaagaggaaacaacccaaatggccatcagctgatgaatgaataaacaaattgtggtatctccacacggcacaatagaatattcagccataaagagaaatgagggactgatacatgctaaagcatggatgagccttgagcgcatttttgccaagtgaaagaaggcagacacaaaaggcaacgtattgcatgagtgcatttatatgaaatatccaaaataggcaaatccatggagacagaaagcagataaatggttgtaagaagctgagagaaaggagtggggagagattgctaaaaaggagtttccttctagggtgatgaaaatgttctggaactacttattggggatgattgcacaacatggtgaaggtactcaatgtcactaatggtaaatttcacatacactttaccataatttttaaaaagctttattagctacattatgttatgatacttaaatgtcataacaatagcattctgtacgcttcactaggataaaaacttcggatttatatgcatctggaagagaaatttttcactgtaatttgcaaataaatgaatttctaaaaatctaacagaaaggctcttaaatcttaatttcaacctaagaagggagtgagaaacaacgagaaccatgaggggagagttaacggggaacttccccaccgtccggtacatggcaggcattccacaaatgttttctgaaagttgaaatagacatcttttcatgaactctgtaatatttgaaattattgataactcttacacaaaaacaaatattcaataaaatgatatttaatttcactgtgactagataatactcatgtaatattttttattttttaactggagtaaaaaaaatcaaatgccatgaaaaattacaggctacttatggcattttcatcattctgagtcttaaagaacttatatgaacgcaccacctcttccatcacagcctctgtcctcattcctgagatgtaggagagtaccgtgtttttttgtatcttctcctggggctgaacaacttgcaagcctcttgaagaaatgccgtattgacagatgtgggtattggcatcatcgctagacttcactgccaccctcatttccccctagtcctgggtaattatttgggctaacgaggtataatctagaaagcaaacccagggaagctcgggaagcaaatctagtgccctggatctttgcccaggttcaagctggttccatttgaccatatttctttgtggataataaacaattatatttaattcaggtattttcacatacttttgaggacagcaaagatcacctggtggccatcaagcagaccatctggaggcaaaactccttatctgaggaattcagaagtcattagactgccctattatctaaagccggcatcttgtactaggcttctttaccaaaaatgtatttaat

SEQ ID NO: 167 - DNA, 95627 bp, Homo sapiens
acagcattaacatttagtgggagtgcagtgagaattgggtttaacttctggcatttctgggcttgtggcttgtggttgattttttatttactttgcaaaagtttctgataggcggagcatctagtttcaacttccttttgcagcaagttctttcctgcactaatcacaattcttggaagaggagaactggacgttgtgaacagagttagctggtaaatgtcctcttaaaagatccaaaaaatgagacttctagcaaagattatttgccttatgttatgggctatttgtgtagcagaaggtaagattaaaagagactcttttctgaaaactgtattatgaaacatttgctaatgatgcttttcacaggagtaataaaaatttgatttagaaaatgtgcttaagtattctgtaacttgacaattgagtggcttttgacattgttgagtttaaaaaatgtaagaaccttatttgaatggtatatctaaatattcatcataattatatttaatataaaatagaataaaatgttttaataaacatttctgaaaaactatgatctggaataatcatttcccttgtaattatcataaaatgtaatttacttttttgcttaggagtataaccaaaatgtattatgtgaaagcattaagaaggatgtgaatatacatagtcaataaaagccatcaaatcataatgattagatttatttcaaatatgattttaactcttcctaaataaaaattcatttatcatttacaactgatattgtcatgaccttagaattcttgtagacaagtattacttgtattatcagaataaaaatattatataaatttgaaacccaattgaatatacaatatttgtaacagttaagttgttcaatagagatttttttcctgtagttgtatataacatatattcttgaagagcagtcttttggagtagtgaatatgaatgtaggagtttttttctgacctcagtaagacaatttctggattcataataaaatttaattatatcactgcttcttgatagattaaaaagcttattcttggaggaggtttgctttcctagtttttgataggtaaccagttatgtgatagatatttggtaaacatttttaaactgaatgaattacatattattcataatttctaaaatcttttcacttagtaaagaaattttgattgagtgaccattacatagcctctaggaactgaagaatattagcaaataatacaaatctctgtttcagtcttccaatctagaaaataaaagcagatatattcttatagttatacactttggtaatttaaaaaatattcaaatatgtttaataccttttgaaaggttgaattattttcagttatattttctaatgttattgcttgttctttggcttgtaaactttatatgtagccactttttaaatgaagaaaacaattatttccttgtacatataaatattataattagtattttaaaatgaaacctttttgtatttacaaacagttccagaacaatgtcaatattacctattgtaaaagacatctttttctgtttctttgtgtaaatatttctgtcttttcttactaaatttatgggaatgtttctaacgtttcatacctacatactgtttgctccagttttacatagataccatttgtcatataagggagatttgttttatttctaatctttaaaatcaagaatcaatggcaagtttaataaacagtttaagttattaaaaagttgaatttgaaatattattaaaatagagtacatcaaagtatatgtgataattaaacaatagtgatttaaacatcttatttacataattgattattgctgacttgtttcacttttattttatttttcatcaatgtgtgtttaaatgtggtatcagtttctactggtgaattgaacatcggcactatatatgttatggtgaaaatgatataaatctgattatttcctaaaagataaagcacaactttgtatttaaagcaatgcttaggccagcctcataattttcataaaagcacatgtaatgcaaaagccaatggagaaaaactacatgaattttcagtggatatcagactcctaatttattccttgtttcccaaatactctctgaaactaaactagttcgagatgtccatcagttctattaatctaccatatctaaaaaatttttacttaacagagtagctttgatcatgaaaaatactcacatatatttcaatatttgcttctgtttatattttccacattgaatactgaataccaaattgagaagatagtttgaatactatcacaatctgctttattcaacagcataacattttagcattacttctgctctgttaagagtgaactttcttcaaaaaaaacactattcattactaagaaagaattatagccagcaggaataatttgtaatttcagctttctatttgttttctttttttaatatattgggtactacatagaacctttctaatgcaatatattgtctacaataacatttccaattgtgtaggaacgttaattgcctccttgttttaacagtctggctcagggggtcactgcaggctactaagaattgggtcagatttacaggacaaagtttaaaataacagtttctcaatcgtaccacctaatttcacctttttgaaatatagtatgaccaaggttttgaatatattatgaccaagcagattttttagatttagggtctaacaattgtgtactatatgaaattaggccacagcccagaaattccaagatgattaaagtgaataaattaaaactctactgaaacatgttcaagtaaatactggctgtgttgtttgggagacatgttttttaatcctggagatttagagtgcagaaacgttatttcaggtcccagaagactttatagatcagagattgatggattccattacagtcagagaaaggagaatagtggtctaaaatcctaaattgtatgtttgaatttcagtgtgataaataagaattcccctttgctcccccaaacccccatattttcagagatagtagtatgtgtatttatctatatggtgtgatttaaattgtgcgatggcccaattggcttcaatatctcatctcctcctaaaatactttacgtgttgatattaatattactataatttcaaccaatctgtcatttacatggaatgacaaatacactgaatacatattttaggatagttaaatttagtattattcataatttactttgaattattatcatctgacaacttccctgaaacaatttcagtgggcgggggagggtagaaatggatgttgatgaggataagaatagaacaaagtgattctggaagatggggttttcccaggtaggacagatctgctggttgaagtgctatagtgagtgctataagagaaggggtagagaaaatgcccacagaaatggcacgagcctgagacgtctgccaaggcaagctttgcttattttaaatttaggcatatcctgggaatgcatatgctactcttttgcctacatataatttaaactaaaaatgaaatatctaagtattgctaactaaaattattcttaggtagaagtaagttcccaaatataagttcaaaagcagattggtaaatgttcttcatgtgtggcctttggtttctaagatctgagccagtctacattgacccacttttatttgcttaatcctcgattgtttattctgcagtcttttgccacttttcattcttcccagttatgccttctcctcctccccacacacaccatcccccacctgcctaggcctttgagattctgccacccaatctatcccgtgctcagttaactaacgtgtactttacccatttcttcacaaaaccatagtacatggaaaggggatgatgtaattgacaaaaaagtattgcattttagcttaaaattataaggagtcataaaaagatagctcagaggaaataaagtaactgaacatcaaaaaatgaaacaataaaaaggaaagaaaaaacatttgacagaacacttttatttcttctgacattttaacttagccaagtttttcataaaccttgttaactggaaatgtaatagatagaaaagtgattattcttccaggccgggcatggtggctcacacctgtaatcccaacactttgggaggcccaggtgggtggatcaccatgtcaggagttcgagaccagcctgaccaaaatggtgaaaccccatctctactaaaaatacaaaaattagccaggcgtggtggcgcgtgcctgtaatctcagctactcaggaggctgaggcaggagaattgcttgaatcagggaggcggaggttgcagtgagctgagatcatgccattgcccttcagcttgggcgacagagggagattccatctcaaaaagaaaaaaaaaaaaaagaaagaaagaaagaaagaaaaggaaaaagcaatattctttcagaaactcctgaactgtaacataaatttaagcttaggacacataggtcagatgtacaatggaattacaaatgttagagtttcctgggttcttgcaacagagttttaagtgcactaaacagttatcaccttgtcttctcttatattttctagtcactactgtctactacgctttttccacaggctgtccataatctacagatataatggaaaggcttccagatagtttcattgttactcatctgttctttcgctcattcatttttccatcactttaacttccacaagtactacttagtaatacttggtacaatgtgtgttgcgtttttttttttttttctctattttcagggtcctaattgtactgtctctttgtggctgagttcgttttttgtgactggaacaataactggcattagaaattagctattcaaatacacatttcaagaaagttgtggaatttcaacccatgttctgatagtatcttgttttatctctaattatgacatacttgttattctatccaacttcatgtgactatcgtctattctcctatctgctttttatggttctggaattttcttcttgctcttttcactgttaagttgtttgtttgtttgtttgtttgttttgagacaggatctcgctttgttgcctgaggctggagtgcccacgctggagtgcagtggtgcgatcatagttcactgcagcttccaacacctgggctcaagcaatcctcctgcctcagcctcccacacctagctaaatttttttcttttcttttttctttttctttctcaaatgcctattaagtgtgacataatctctattctgctttgtctctagagtttgtttctttaaacaattctttactctgtttacaaaggtatatatgttacttctgaaatgatctttattctcatgttatttataaaataatttgaatatttcttattttgaaaagctaattagatcatatcgtatatatgcatatagaattgacccttgaccaatatgtgcttgaacttcaggggtctgcttactatgtgaatttgtttcaactaaacctgggtcaaaaatacagtattggtgggttgcaaaacttaagcataggaaaaactgacttttcgtacatgcggtttccagagagccaaatgtagaatttaagtatgtgcagattttggcctgtgtgggagtcctggaatatatatcccctgtgtataccaaagccaaaggattattgaataaatagtattactatagatcagtgagaagataagaaagaaatttaatgcaaaatacctatttttgctatttctgttttgttcatttgctttatttttttccaaattgattttgtaactttgctttataatatattctgatacctactaagtttagaagtaggctatttaaaaaataatatctactgttttttatgcacaaaataattttagaaaaatagaataattgaacaaagagaccaactttagtctaccaaaacaatctagcacaaatttgattaaggatttcccaaatatataattttatcatgatttatttcatttgaataaaaacacttttcaactaacagttaaaagatatattgacattgaaaataagtaattagttctatgtttgtatgtcaataataagtaattagcttggtgtttgtatgtcaataatgcccccttaaaatttgaaagtgaaaaaattaggtaaattaagattattaaaatattaagtaatattgatttttagctttgaccaaaattatataactattttcctcaaattatagtaaaaacattcctactctttaccagtagttaaacgtattcacactcttaattcatgggctaaaaaaaaacttgattttgtttagtattattcttacttttttgagacagggaatcactttgtcacccaggctgcagcgtactggtgcaatcatggctcactgcagcctcgacctcctgggctcaagcagtcctcccacctaagcatcccaagtagcagggattacagccaccttgctcaggtaattttttttttttttttttttttgagatggagtcttgctctgtcgcccaggctggagtgcagtgtcgctatctcggctcactgcaagctccgcctcccgggttcacgccattctcctgcctcagcctcccgagtagctgggactacaggcacccaccaccaagcccggctatttttttgtatttgtagtagagacggagtttcaccgtgttagtgttagtcaggatggtctggatctcctgacctcgtgatctggtgatctgccggccttggcctcccaaagtgctgggattacaggcatgagccaccgcgcccggcctgctcaggtaatttttaaaattttttgtagagacagggtttcaccacgttgcccaggctggtcttgaactcctggggtctattgatcctcttgacttggcatgtcaaagtgctgggattataagcatgacccactgcatccagactaaaactaattttaaattgtaaaataaagccaaatgaattaaagcttcaccaatgtagtgttttgtaaacaaaattaactggcaattaaatgacttgtaaacgtaagatgaagtattcattgtttaaactcaaatacttagatatgatggcttagtctactcattaatctagaatgagaaaaatgagatggctatttcttttagttttaagataaatcacatctcaaaaaaatgtttctgtgcctttcaatttgtatgcatcctatttaataagcccgttgtacatacatgctgagagtttgactacttgggccaaaataaccgtttgttgtctacttgaaggtggttcaactgagcttgaacattcgattgttagtcaattcaggcaaataaaagttatgtcacaagatatacctaattattattagaactcagtgcagtgaatcattaccttaaatacttttgctatggcatgagttgataatgatgtaggacagcaagcccccaaattgggtcttagcctgggaaggttcttggttttgtccagtaaagaattcaagggtgagcctgtggtgttaaacagcaatttttgttgaagtggcagtgtatagcagcctcagaggcacctctccttgctaagcagggctacccataggcagtgtgcccacagtagcagctcagaggcagttctgcactcatatttatatgcacttttaattatatggaaattaagaggtagttaatgctgaaattgccaggaggaggatggtaacttccggttgttgggtcattgctgtggaaagggcctgtaacttctgggtgttgccatggtaatggtaaactgtcatagcacactggtctgtgtgtcttacagggaggggcttccactcagacctgttttggataatcctcaatttggtccagtgtccaagtcccatctcctatctcaataatactcaatacaataatggttagaacaaaagcagacaggaaagtgtatctgaagtgagaagacctagacattaatgaaaattcttccacgaactatgaaaaacattgttcttcaattgtggggagcttacattttgatgtggggagatagatagaaaacctaatgaacaaaaatagttatagcattgtgaaaaattttgtgaaggaggtaaagtagggcctaagagaaaatagagatggggatggtagtatgtagagacattaggtgggcttggtcttggggactagaatgagtggatcactttgaggacagaacatttgagtagaggcctgaaagatgagacaaagccagtcatcagaaatctgtcgtaaaattattctaagaggaggaaataacccgtgtaaaggatctaaggaaaaaataagtttgaaatgctcaacaaaatataaacaaataaatcagcgtgactttgcacagtaaatacatgggagatttaacatgatgagatccgagaaagtggcaagagccagataaggggttcccaaaccaaggaaaggagttagcaatgctggataagtaaaaagtgaagtcatagaagaattttaatcacaggaatgacatgaccagatttgcaagaatcacttgtcactctgtgaatagactgaagtaacaggagagtagaggactggaggctagttagcaggcaagtttcatgaccaaagtgacagatgatgatctgaactaagattttgaagatggtagtaggagcaagggaaaatagaacaggggcggtcatatctttttcttacaagcagaatcaaaagatgccatttaacactgatggaaaaagcaccagaattttaagtactatttgaagagaaaaggtaatcaatatgataattctttatatatagtaaacatattcacagagtaaatattgtgagaagttggtaggaagattttgtggaagagatgtatccttgttttctacatctggttgttaaaagcaatgaactatatttggaaatcaagaattaggggcacaaacgtatcacctggaaatataataataaccagaagggaaagcatttacttctcactaggaagtgagcgggctaaactttttttgtgttaatggattactttacttatttattttttccaataacctgaacatcatcaaatggatctaaattttgaaagtgaaaaacaaacatatcagcttgtaattaatcagttttccttttgtgcggaaggggccggggattgtgttgttatgatagagtattagcaccatctagtggagtagaatatgtttacttaaattataaacatcgaaatagtgcaatgtggaatcacatattatatgagttcactaatacaaatttgcaaaaaggtcaagggaaaattagtgcccataaaaactttcacattattttgtaaaatataattttatatggtgttttctttcttatgaaatattgcaaaatgttttcatatggatttgttccaccatgttaatgggcacttctaaaacttttttctttgggctgctacaacaaaatattattaactgcctagcttataaacaacaggaatgtatttcttacacttctgaatgctagaaagtctaacagcaagatagtaccagcagattcagtgtttggtgaggtctgctctctggttcatagacagtgccttttggctgtgtcctccaatgatgaaagggacaaggcagctctgtggtgcctcttctataaaggcacacatcccaaatcatgacagctccaccttcacgacctaatcacttcccagtgtccccacctcctaatactatcacattggtaattaggtttaaacatataaattgggggttgtggggaggttgcatgtattcagagcatagcatatgccttcttaacttactaaagtctaataataatttatcactcaggattcaatgcgggaagcttaagtagaagtagaagattacctatctatcagtcaattaattgattgacataccaatctcctatctacctacttaaaaagaggttttgttttgtttgttttgttttgttttgttttttaaataaattgcctcaaggaattgtgagcatgagataagcaagtctgaaatccacagggcaggtagtcagaaaaggaagattacagacaggatggaactcacaggaaaggaagctgctttccacagaattccctctctttttcagaggagcctcagccctatgtttcagacctttcaaatgatttgatctggcctatctagattacctagaatgatcagcttgtttaaagtcaactgattgggagtgtatctggcaacatattttctcaccaacatttagattagtttgactcaataactgggaatgctgacttaagcaagatgacttattaagaaaactgtcacagctcattaatacctttctgtttttctggacactgtgaagaacttaaaagacattaattttattaatccttctcacagtttacctactattgtcatgtgttttatgtatatgggtgtatacacatacatgtttgtatttaaaaccatgtaaggtaatatttttattattttatagtcagtattcatttatatttacttgaacatttaccattttctttgtttttcatttcttctttcatcctaagaccttatatttaggatcagtttcagttttctgaaatatatcttttttctctccttaatgtgtatttatagtggcaaattctctcaaattttattaatcagcccgggcacggtggctcactcctgcaatcccagcattttgggaggctaaggtgagtggattgcttgagcccaggagtttgagaccagcctgggcaaaacggcaaaacctcgtctctacaaaaaatacaaaaattagctgagagaggtagtttgtgactgtagtcacagctacttggggggctgaggcaggggaccacttgagcccagggggtcagggtcgcagcgagctaaaatcacaccactgcactccagcctgggcaatagagatcttgtcaaaaaataaaataaaataaattttatgaatcaaaactttattctcaaaaaattatttctgtatatagaattctatatagatagttatttcttcctgaaaatggaagtgattaatacctggtggcgtctgctattgctattgagaagtctttgtaaatctaaccattactgcttttaaattaatatttttctctaacaaggttaagatattttctctttggttttctgcatattccttatgatgcatataggtgtgtttttttactgcttggaattttttaattcttggatatattaattggtatgttccattcattttttaaaattctcttccaacattgctctggcttttctatcctcattgactcttagctcatcttgtgtattttccacacatgtgtgtctccatgttgcatcctgtattatttcttttgacctgccctcctgtccacgaattctttttacaactgtgttatctgctattaagctgtccattgatgattaaaatgggttttttcatttttagaaattatatttggttctttttaaaatctgctactactttgttataatttctttcctcagatatcattagtcaaacttttctcttacatttaaacaacagaattagtattgttgattatagtctgtatatatttattccaatatcaaatatctattttgttccttatgaagtttatggtaactaggtgctttttctcccgtataatgtctttgacatttgtaataataatttggtgcttaagaaaaaaatcttcctcatattaaagttacaacttatcttttctgggtggctagaagaactttcagtgtgagactaccttaagccaaatttgtgctttaaaattccttggtgctctaagcaattcaaagctgggttcctgtaagaagagtgtggtttacttccagttctcccttatcctgtgggtgaattcatttaggtttccaactttgaattttgttgctttagcctaataaggctatcaaaaagcaagcttgtgtcttccccaaatggtgaatgcccacagtgcagaaaaaaattggctgcctgttttcctttctgggttctgattataccaagatatgttatggtaattctttactgtctcgtcagctttctaaatgcctctatgaaagtatttatttcaaaacatatgttttcctgtttttttccccttttgtgacagggtctcaccctgtctctcggctggagtgcggtgacatgatcatagctcactgcatccttaaactcctgggctcaagagaccctcctgtcccagcctctcacatagctgggacaacaagtgtgtgccaccatgggtaactaatttgtttctttaattttttgtagagatgggatcttgctatattgcccagggtggtctcagactcctgggctcaaggggattctcccacctcagcctcccaaaatgttgggattacaggtgtgagccaccatggctggccacctggttttattgtgaaggtgtcctaagtgataagattaatctgaaataatgaatcccaaggcactcaaattttttgtgaaatagccagacaataaatattttagacttcgtgagccataatgtctcgctactcagctcttctattgtaacataaaaggagtcatagacaatatataactatatgagcatagctgtgttctactaaaattttatttacaaaacaagcagcgattggatttggcccacaggttagttttctggcccctgacctaatgtatctcactataacagaaaatatatactgactttccttcttactattataaattttatgcacataattaaatattacccaaaccacaatttttaattcagatgggtgtagcataatttgacaattttcataaatattctaattatatccattattaaaaatgctggaataaacactctgtacctaaatatttcacaaaatctttaattattatttgttacttttaaaaaattgaaattatttgtcaacttacgtatgagtacttttaagattctttattgctaagttgctttttagtgaagtaatagtcatttatatttcagttttatttaataataatatttatattacctaattttccagcaaaattgattatcatctcctttacatttttgtgttaaaattggtcaaaaaataattttcttttaatttttatctcttttaattattggtaatggtcacgttaatgcctgttcttaagtaaatgatctatcctactctaacatttttctttagatagtgtttagtgcttttgttactgcaagaagtgtttgtgttaagaataatttttcagttaaattttctccacattttgtatatatgattttttcacaaatataatttttaattaacaaagttttaatgtgtatatgttctgtttgcaaattgctttatgcattaagccttccttttttgatatttattcatactttttaataaatatatttataaaataaatataattatagatagatggcactaagataatagtaagttaaaatgacatatcatcatatatagcagataattaaaaaattataaaagaatgaaacatatatgtatttattttaaatttgtttaaacctaactctttagtctacctggcatttgtgtgcatgtgtctgtgcaaataaagtaaggattcaaatttatcccatttcatttccagtgggttttattttttatttattattattatatttttttgagacagagctttgctcttgttgcccaggctggagtgcaatggcgtgatcttgggttactgcaatctccgcctctcaggttcaagagattctcctgcctcacgcccccacgtagctgggattacaggcatgtgccacaacagttggctaattttgtatttttagtagagacggggtttcgacatgtttgtcgggctagtctcgaactcctgacctcaggtgatccacccatctcagcctcccaaagtgctgggaatataggcgtgagccaccgcacccggccccagtggattttaattgcaagcctgccagagtgagtttcaatttgaggtagtccaagtttacacagtacgatagacttacccattgccaaggttacttggcttgaaggaaaatacagaataaggataaaggcagtatgcacaagaacagcttgatggagatttcaggcactgaaactcagcttctaatatcttaacccccaccaggataattttgctgatgaaggatgaaagttgatgccagtataggtcacatccatgcccggtaacaacagaattgggtatccttagtttaaatactttagttgtcaccttgaacttggagggtgatttatgtgatcatcactattatttgctgttttctattttctttagatttcatttaatgttttactagtttcttgaattagaaatttggataattgatttccaacagttttttatttctaattcattcgagttatatttttttctctctaatcagtgcttcagcatcagcccacaaattttaacatatatttccattattgtttatttcaaatcatattctcatttatattatatttttctttaactcatgagttatttataagtgttgcttgccaagtgcggtggctcacgcctgtaatctcagcactttgggaggccgaggtgggcggatcacttttgggaggccgaggtcaggagattgagaccatcctggctaacacggtgaaacaccgtttctactaaaaatacaagaaaaaaaaacccaaaaaatagccgggcatggtggcgggcacctgtagttccagctactcagatggctgaggcaggagaatggcgtgaacccaggagtggaggttgtggtgagctgagattgggcactccagcatgggggacagagcgagactccgtctcaaaaaaaaaaaaaaaaaaaaagggttgcttaacttcaaaaattttgtgaattttccacttattttctgttagcaatgtctagtggtcagggagtatacttagagtggctttaattttttgagattggtagagatttgcttggaatgaatatgcatcttgcaattgttgaagacagtgttttattaatataaaaaacttaatttggttaataatgttgcttatatcttgtatatccttatttttctatttcttttctattggatattggaaacagtgtgcttaaatctcaaactatgatggtggattgcttacttcttttatttctgttatattttgaagatgtattaatagttttatgcaaagaggcatgctggtaaatgtaaaacaaccaactattttttaaaaggaaagggaacaaccatgatttgtaaaatttgctgagtttcatggtgtaaattctcacaatatggtcaatttcaagttaccaacgtgtcatcaggagacattgtattagcaaaagatgtgtataattggctcctatgagtcagtatgagccagctccagcaaacattgttcagacacatttgcaattattacatctttctgttaaagtagcctttttattaatatgaaatgactctctttttatctaataatactttctaactaaaattatcatttgcttgatattaatacattaatatcattcttactttggttgatacttttctagcatattggtttttatcatttactctcaatttatatgtacaattttattaaaagtaatcatcatatatttgagttttcttttatgcttttatccagtcagacaatctttgtatgtttagtatggtgatgaatccatttatatttaatgtaattactgatacagttcagtttaagtctagcatattgctacttacttttgcctcaatttttctctcttcttttcctgccttctcttattttaatcaaatagtcttgactatctcattacatcatgtattctagttattttatgtatctcaatattattggtttagtggctaacttagcaattacaacaaaacatgcttaaattattacaatttattctaaattaatatttttaccacatcaagactatggggaaaacatcacaacacttttattttctttaccttttcctgacacttttgctactattgtttcatattatactcttgaatttattaaaaacactattaaacatggtctattgatttaaacagtcaaggctcttttttatttgagtaaaatatacatagcatagggtttatcatgtttcaatagcttttttatttactcttctatttattttcttcagttctgcttattcctttttgtacttctttgcttatattttagatcagtttccttcagcccagagaacttttttagtatttttctatagttgagtctgctcttgttgaattctttctgcttttgtttgcttaagaatgtgtttctatttgctttcatttttgaagtatattttcaccatttatagagttctctgctgacttttaattttcagcactttagtaatgctaagacatatatattcagacttcagtatttacttccacagacttggctgttatttttactattctcctggaaaaaaaatgtttcctctgtctgtgatatggtttggctctgtgtccccacccaaatctcatcttaaattataatctccataatcatcacatgtcaagggaggaactcagtgggaggtgactggatcatgggggttgtttgtcccatgctgttctcatgatagtgagtgagttcttatgagatttaatggtttaagcatctggcatttccccaacttgcacttctctctcctgctaccatatgaagaagatcctctcttcttcttcaccttccactatgattgtaagtttcctgaagcctccccaaccatgtgaaagtatgaatcagtttaaacttctttttttatgaactacccagtctcaggtaattctttatagcagtgcaaaatggactaatacagtaaattggtaccaaggtagtagggcactattataaagatacctcaaaatgtggaagtgactttggaactgggtaatgggcagaggttggaacagtttggaggtctcaaaagaagacaggaagatgtgggaaagcttggaacttcctagagacttgttgaatgctttagaccaaaatgctgatagtgatctggaatatgaagtccaggctgaggtggtctcagatggggacaaggaacttattgggagctggatcaaagatcactctaactgtgttttagcaaagagattggcaacattttgccccttccctagagatctgtggaactttgaactttgagaaagttggtctgaaattggaacttatgtttaaaagggaagcagagcataaaagtttggaaaatttgcagcctgatgatgcaatagaaataaaacccgaattttcttgggaaaaatgcaagcccactggagaaatctgtgtaaggaatgaggagccaaatgttaatcaccatgacaagggaaaaatgtctccagggaatgttagtgatctttaaggcagcctctcccatcacaggcctggttgcctcggaaggaaaaatggttttgcaggcctgggccccactgctgtatgcagtctcaggagttggtggcttgcatcctagctgcaccagctgcagccatgtctaaaaggggccaacatacagcttgggccattgcttcagataatgaaagccctaagccttggcagcttccacatggtgttggtcctgtgggtacacagaatacaaaacctccacctagattcagaaaatgtatataagtgcttagatgtccaggcagaggtgtgctgcaagggaggaaccctcatggagaacctctactagggcaatgagcaagggaaatgtaggattggagcccccacacagaggtcccagtggggcactacctaatggagctgtgagaagagggccacagatcctccagatcccagaatggtagattcactgacaggttgcaccttgtgcctggaaaagccacagagactcaatgccagcagtgaaagtagccagggcagggggccataccttgcaaaaccattggggcaggtctgcccaaggctgtgggagctcacctcttgcatcagtgtgacctgaatgtgagacatggaatcaaaggggactgttttggaactttgagttttaatgacttccctattggatttctgactttcatggagcctttggtccctttgttttagccaattcatcccatttgggatgggagcatttacccaatgcctgtattcccattgtatcttgaaaatgactaattttcttttgattttacaagctcatatgtggaagggacttgccttgtctcagatgagactttggacatggactttagggttaatgctgtagtgagttaagacttggggggactgttgggaaggcatgattatgttttgaaatgtgaggacatgagatttgggaaaggcaaggggcagaataatatggttaggctctgtgtccctacccaaatctcatcttaaattgtaatcaccataatccctgtgtgttgagggaaggacccagtgggacgtgcttggatcatggggcagtttctcctatgctattctcgtgatagtgaatgagttctcatgaggtttgatggttttataagcatctggcatttcccctgtttgcacttctctcttgccatcatgtgaagaggtctttccttccccttccaccatgactgtaactttcctgaggcctccccaaccatgtggaattgtgagtcaattatatctcttttctttataaattacccagtcttgagtatttcttcatagctgtgcaaaaatggactaatacaatctgcttttaagattttgcctttatctttggttttcagcagagtatcagtataggttttcttggtatacagcattttgggggtttttagaaattttgattttgtgagctgatttctttcatcaattttggaaacctttgagctattgtttcttcaaatattgcctatgttcattttcttctctattgttagaattccaattaaacatgttttataacttgactctacaccacacatttttttatactctgttttgtttgttgttgtttatacacttttgtctttctatatttccttttggttatttttacattaaacttcctctaagtttaataagtttgtattgtgctgtgtccatttgattcttaaaaccatctgacaagttgttatttctgatttttgatccaattttaagatagcacatgatttatgagtcaattttattttgaatatcttttttaaattttcatttctatattttctatagttcctttaatgttcctaaaatagctgttataaagacctaacactaattctaacatctgaatctgagtgtctagttctactgaatatttattttctctttttgttcacagttgtttttgcttttttgtgtatcttttaatttttattcaaaatcgtatttttaaacaaaaacatgtaatgacaaaagtttatataacttactctcatcaacaagattgtttgctctttcttgagccactcaaaaatttaactcagagggacctgggtaacacttttagtttgagtcagtcccatttctggtttctagtctcaaagattaaaccctcttgggtttttaaagtcaagaatctggttggtttcttctatctcaaaagactaatacacacacacacacacacacacacacacacacacacacagagtatatacatatacacatatatatacataaatataaatatgtgtatatatatatactatatatgtgtgtacatatattagacttttgagatagaagaagccaacacatatatattatgtatgtgagcatatgatatatatataataaaagccatttatatatatgtttgcttttctgctgttttgactctgttcttatatatatataatcttaaatgctcatatataaatgaaacagcagaaaagtgaacatatatataagagcttttattatatataaataatatatatatgtatacagcttttctgctgttttgacatctgctcttaaatatcatccagagtgactttcaaatatggcatgttttgatgagaatactagttgtgtatttgagtcagatccattttcttattgagactttttttctatgagacaacgggaaagtcagtcttcccgtatgaagctacctagactctagcaaagcaacctgatttggcaaagtttcagaattcttcatgctagatatagcctccttatgtttggttctttcttacctcattaccattcttccattcagactaaatagaggcctgatcttcaatccatatccagagctgacaaacataaccaggtaaaaaatggccagagaccctatatttacttgaaacaggtccttcctacttgtgttttgttcatttaatcctctttgctcccacaacttacctttgaacatacacatgcacacacaatttgttgttgttccaatttggagtagaaacattgttcttttccatcctattctatcttatttggagtgcctgtataattctgtattaacttatcatgctaatttttgtaaatataatttttctacctgtaatgcatattatacatctctttgattacttaataactggcttccctaatagaatggaaatgctttgagaacagatagtttgtttcttcattgttttttctttataacttagaatagtgctcaataaatatttcccaaattaatggaagaatagtagaatgctctccagcaattaagagtaatataacaaaatatatctattgctttgcaaagttttttaggtgtttttccacagtgaacattcttataaaattatgtagatacaaattttataaggtgaaatgtatagttacactacatgcatgaaatgtatgtttactccatagatatggggttaggagagagagagagagagagagaaatttagatagacctgtgactgtctaggcatttttaaaagcaacaattacctaaatatactgtacatttaaatagacactttatgcacttattttgtttttattgtttgtagattgcaatgaacttcctccaagaagaaatacagaaattctgacaggttcctggtctgaccaaacatatccagaaggcacccaggctatctataaatgccgccctggatatagatctcttggaaatgtaataatggtatgcaggaagggagaatgggttgctcttaatccattaaggaaatgtcagagtaagtacttaatacatttgtgaaatttatgaaaactaggtgtaaaaatacttaagatttaatattgtagcaattatgcctgaattatatcactattgccagtcaaatacaaaataatacataatcttttttttttgttttgagatggagtctggctctgtcacctaggctgcagtgcagtggcgcaattttgagatggagtctccctctatcgcctggctggagtgcagtggcgctatttcggctcactgcaacctctgcctccctggttcaagcaattctcctgcctcaacttcccgagtagctgggactataggcacgtgccaccacgcccggctaatttttgtatttttagtagagatggggtttcaccaatgctgggcaggctggtctcgaactcctggcctcgtgatccacccacctcagcctcccaaagtgctgggattacaggcgtgagccaccgtgcccagccaatacatcatcattttcaaaaaggggtggtcatcctccaaaattaaaaaagcaagcatatagtttaagttcaattatgaaataatggctttgctatgtttaattttccttacattcaatctgtcttcttatataatatcaaatatacttgttcccccactcctacataaaatatattccttgctattacatactaattcataactttttttttcgttttagaaaggccctgtggacatcctggagatactccttttggtacttttacccttacaggaggaaatgtgtttgaatatggtgtaaaagctgtgtatacatgtaatgaggggtatgtagtccatacgaaaagaggtttataattaagatagtaaataggaactctactactttatatatttttaaggttattatatttttctatgagcatttaaaaaagtaatacacaagtacctgaaagtttaactatgatggaaataattaaatctggataccatattatctccttaacattgaaaaatttaaatgaagtataacttctctgatagagtataattatgggagagtgggaaaacagtatgcacatatataagtattcacccaacaagtcttcacgacattctattttgtgcagagtatcatgggagttcaatgtgtcaggaacaataggaattgtaaccaatttatattgtatggtaactgttttgacaggttttataaaatttaaggaaagcaagactttcacctgcttataagttttacttacaactaaggttacttaatgtcccaggtctgcaaattattcttaccacatggattaaaaatactactctttcagaatcattgactctgttccttctaaccaactactgggttttcattgccaaaatcatcactgtatatcctcagtgttattttatcccccttattctctgctagatgaaaaattattttggagaaaaatttatgtatgggaaaaccaggattagatcactataatcgtatacttcataaatataaatgtaaccaaatattacaaatggaataacattattatttccccattttttccttaatttgaagcaataaaatataatagtttaaagcttagtcactggagtaagcctgcctttcaaaactctaccacttaacatttatgggtatttaaaaatatatctcttcactaccatttcctctcctacaaaacagacacattttatgtgcatcatggattggcaggaaaaataaataagacacacatctgcagcccttagaagagaccttgagatatagtagataccaaataagtataatttcttatgaatttattctctccttagtcactacctgagggaggtttttcaaatacatttttagcccttcaatcattactgctgatcttatcacacataaccaaataggttataatatcctggggctgaattttttaatttgctaccttcctcacctctgaaatatttcttttatcacaggcttgtgtcctctctttaagttcagcacttgacttggctaaggagataaaaatgtatagatctgaagcctctagcaatgattgcacattttgcacatgtcccagggaactcatattcaagtagagcattttttagattcaaagggcaggcttgatgggttactaaaattacttaagttcaacattagatggcttggatgagcagatttgactcactgggtattctcaggaaaaaatctctacgatagagatggagagatggaggcaagtgctgaaagtaaatcacacactaacaacttttggctggcactatctttattatgtagaaaccctaaggtgttcagaaaatatcagaatcatggaggacagaaatacggtctaagactggaggagagggaaacataaggttagtcgttggttactatggtatttttagcttttgttttggtgatagttcatggagcttactatattattgaatttagctaattagataattcaatgaaaaataagaatactttgtatgaaacaataatgattttgtcgtgaaccaaggattatgattattttcagtccatgcaccaagaaggagagaaagataaagggagagagaggttaagagatttttcatctatgaaaattagaggaagaagattaatgttctagagaacgttaagaaatctaagacagagtgaaggaggaggagaaggaggaaggaaaaacaaacaagaaacaagaaacaagaaaatgcatatgctgttcattttccttaatatggagtttctggacactcagaatggcatcgagtttaaaactgcatgtaaacacacattatgtcaacgttctgttattttttggttttcaggtatcaattgctaggtgagattaattaccgtgaatgtgacacagatggatggaccaatgatattcctatatgtgaaggtagacataaaatgtatttacaagtatattgaaataaatatctaagatttaaaaaaagtcttacattaaaatatcttaaagtctctattaaatatttttatttaatgtttttttttctcatacaatgtagagtgggaatctagtctttttattactacattcttggtgtttcaaaagccaaaaacgaatgcagcctgatctgatataataattgaagtattagacattaaggaatctaaaactgatttttatttccttttggattctaatgactagaaacgcatataagcatcattagctaaataaagaccagaattttgcctttattaatgaagaagaactcacccagtaaccacccaaatgcagggatctatggtaacagctgaagtggagaacgtgattgagacctcccactaagggaggttgcctgtggacttacctttactgaaaagaggaataaactaagggcgagctctgttatttctcactggtctgtaaagcaaacagtgaaaatgagaaaatgtagattctgttttcatgttttgagctaataatccaaatctctagtcattatggaaataaaagaaatcaaccagagtagtatttcctaattccacagtgagtggcaagtggagagagatacagaagaaacgtgataatcattcaaaaactgtcaactacagaaaataatggaagattttttcatctatgaaaattggaggaagaagattaatggtctagggaacatctacattgaaatcacctgggatgcttgttaaaaactaaaatctttggttactaaaaaatgacctactgaatcagtatctttggggtgagcatgcaggaagatagccctaaaatttttattttaacaagcatcctgagtcattctatagtacaataaagtttgaccacaactttagagaaattggaaaatattaagtagaatcaaaagaactactcaaattattttaaacacttaggtcgaagaggatggaaaattaacgatgatttctctattgaagttaatgtcataaagtttgcttttacatcttttaggaacacagtgttatattattctagggcataaatgaaaatgtatttaattatctcaagctttatatttcttaattatttaaaaatactagtttgttactacaaaaatacaagctagcattgaaagtagtaattttcattgtccactcccatagaaaagaatcaggaataaacattccatttgcttgtttcttagaggaaagtatctctagcaaacaggtatatcaaatgcttctaaaaataatttaagtaatttcctccaatcttatcctgaggatgattttatacatacacatatttttcacaataaacttttaaaattccattagaaaacattacatgtattttcttcagttgtgaagtgtttaccagtgacagcaccagagaatggaaaaattgtcagtagtgcaatggaaccagatcgggaataccattttggacaagcagtacggtttgtatgtaactcaggctacaagattgaaggagatgaagaaatgcattgttcagacgatggtttttggagtaaagagaaaccaaagtgtgtgggtaagatacacttactgttttagtatttttagctttttaaatgtaaatatacatttaaaacatcgttcattctaaggaatatcagcaatattaacaatagctaatgtttattgagcacttactatctgcctgtaattgagctaagttctttgcatgcatcatttcattttaactttcaaaaaactccatgatttacttactcatcactttcattttataatggaagagactggtgcaaagaagttaaatcacatgccctggattatcatggcataaagagtcaagttaggatttaaatgtaggttatctgacaccagagtccatgctttaaccataactccattgtagttgtctcttaggttgaaagagaatgctaagtatttctgctgcaagctgtaagacctctggaatagacatttgtttttattttgaaagccaaagattcattatgtatttccagagatacattagaatgacattcgtttttgaataacacttttaggaagcagacctattttatatttgtactgcaagtttactataaatgttgctgaattgaacagaatccactaaataaattgttgcctcttaaaaaaagttttatagtaaactgtaagccaggatttttttagtcataatactgccaacctgtgcatcatgaccaatcaaagattttggcttctgtgataaacatcgtggttgatttgtttagtagtaccatagttcaagttcattttaccaataattgtttggcagaagtttctggcatatttatattttaatattatctaaaatatctaaattatttttactattaaagtctgttatatcttagatacagataaaagaatttctcttcttaagaacactttgtaacaacaatagttctttatgttaaatctaatatttttattcagcatagcaaatattatgtactttagaagtacatggatggaatttacatccttacaactagattcctgtggttagtgaaaacttcctggaatggctgatgcctacgattaagtcttaaagaaaaaaaacgagattttgtagatgaaaatgagagcaaaagcataccagagttcagggaaagggaagtggaagggcagtgaggctttaaggagcatgaagcaccactgattcttgtccattgttcctaggcaccttagtctaggatgcaagtagggaacgagtcagtgataaatagaaggtgggccaatacatagtgctgaggtgctgcatgcaccatgctgaagaacgcgtcttttattcagattgatttgggaatcaatgaaggatttcaagtggagttacgatgtgtctacctgagaggtcattaagctatacacaaggaaaatggattagaaagtgggagaacagagtttgggaaactacttatgattggcacaatcccaggtaaaaatgtttgagagaagtgggtataaaaggtataaaagatgatggccattttttttttttctgaggaaatcttggctaaatagtgatgacacaaaaacaggtcagttacttttcagagatgtaatgacaatgagttaaatcaatgtctttgacaaaaagtcctgttgataattcctgtcttatcaataactagaagatgtgttattttttgcaggtcattcagtgaaaacatcacaataaaactatatttatgatcaattttatttatacagttgatgaatgttactggtcactatttatttcaagaaggctaatttatcctgaaactaaataaaatcagaagcataattttaatcagaattttaactttcttcagataaatcatttattaagcggtcaagtcaaaacagaacttttgtttggttgactgatttacctgatggaaacaacatttctgttttcatataattatgtcctggtcacagtcctttaatttgcaataaacattttggaatttaatcccttttatttagaaatttcatgcaaatccccagatgttataaatggatctcctatatctcagaagattatttataaggagaatgaacgatttcaatataaatgtaacatgggttatgaatacagtgaaagaggagatgctgtatgcactgaatctggatggcgtccgttgccttcatgtgaaggtaatgttacctttattttctggatctttataaatttatcacatattttaattaattcttttaataaatccacttattttaatcaaaagtagagtgctaatttatgtaaataaactattataaaaaacatatagcattttctgtgttcaaggttcattttgagtacacttcgtacgatacacacactctgaaaacagacataaacagggccagaaaagttcagtagcttattaagtcattggtctatcatcaaaaaccatgtctggatcagagtgaggactataatagacttcctaattctcagtaacatacaattctcaaacaagtagattgctccactaatgcccagaatttatttaaattatatgaatattttaaaatactttaaaagtaacttgtattaataccaggtgaggaaactctcaactgacaatggaattaagttgaaggaagtgaatatttttgttaacaacaggcccagtatgactcaacggtgatgatggtcctggaaaattaccaaaaaaaaaaaaaaaaacctctcaactttcattatggagggatgttacacagagccaaagagttcatctcaactgtgctctttgcccaccaaaaaatatatctggaatagagtgttctacttaacctacttcattttaaacgggaaagtttcaaactatcatggccaagaagagagaatatggacagttgtggacttttaagaaattatgccataagacgtacagtaagaagctacagctatagtgtggtgataacagttttgagatattttcaaacatttataaaataagtgggtttgcttttgatgaggtctgctgcaattagtgaaacaaggaacagtgttaccacatatggtccagaaatctaaaagggtgatactgccatactgtgagagaaagaagagttgaactcttaagagccctctgaactttaaatcccatgattcataaatacatgtttaaactgtgctttagtaatcctcttttacaaaagaatagttaattttgggttaattttatacactaaaaaaattttggtttgagcccacaagtgtctccttggaaaacatatttttcttcacaattgcgtgatctctacttttaggcactgttaagagaatattttagaaagaaattaatgaacatgagacagtaataacccacatcagatccatgtttggctaatggtgtgtggggtccaactatttgtcttcatggcattcgtagttcctaagcaaaggaagtgcatgcacaagtcctttggcattaacttctacctgaagtatattatttccagagcccctctcaaatctatagtgaatttatccatgcagtaatcaaaatgtaacttataaaccacttattttacatcaggaccttgctgtgtattgaagataaacattgcaataaaccatcattccagctttcaatgaattcaaaataagactctgggaatttagttttatttgaatatgtgactctgtagcattactacctcattgtagtcatctgattttttcgtctcttttacttcttcactttgatacctacttaaaactcttccttagcacatatttgttttcacaatgagagatccatctgtttttcccaaatgtattactgcatttctattcttgcttctcttgaacactaattgattcacacacacacacacacacacacacacccctcaaagactctacatttataaaacatttttcttttataatttttttccatttctcagtcacaagtacaagtaaaacctgaatattcaatactatgcttgcaggtcctgctttctttaggaaaagagataccaagagaaggcactgggattgggtactccttttcagaagacagttcactaataatcgatataaataaaggaggatttatcccaaattagttaagcatacactctctcaccacgttttattttattgaaatatactttacgctgattagatatagagaagtctttcttaataaaagaattccactctttgtatgccaactaatatagcataaatatgactattttcttggtacaaagcaaggatctacttgctgatataagatgaattcaaaatctatacacatcattttctctgaaatcaggtaacttcaaactctctttgttgcttctaaatctataagaagtttggaattaaataataagataatattaaagtgaaataatctacttaaattttaaatactttaattttcttcaatctggtctatggcacacacatgtcagaggactgatttaaaggtgaattgtcaaaactttggtctctgtgtccaatagggacaatctgtaacagaaagttatttatagaaacaatcaaaggtacgaagaactgctaaaggaaagctatctttgatccgaatctatctcttccctgtacagattggattttctattggttcaaagcatagagtgctaaccttgaattagtattctaacttcaaatgaccaatggttgtttccaatagtaggaaaatatggatagtctcaagtattgttttggataaaggtacaggttcgggcaatgttttaataacatgatgtatttttaaaaagattatgagtgtaggaaattaaggtttatcacaggatttatgtctactgcttgagcataatcaccagaagtctttctattcttaattaacaaaattgttccatattattttattgatttcttagttaaactcttgttttttgcatctcatagcttttgacttcaaaaattggtattaaattgagctatatcataaggaaaaataattgaagatacataaactgaactttaatgggtatatgaaaatatgatagagaagaatgaagtgacagaaaaaaagaaaaaaggaatacatttaggacttatttgaagttagtgtcaacatcaaacactgaagacatatttttacataaaatagtaaaattttaaaatagtaaagctttaaaacttgtatattaagtcacatacatattgtttctcatataattattgctaatctaaatatattatcctgttagctatagagatatattaaagcttattctgtcagaacgaagtataaacttaggagctgaatggacacagtggaagtatggtattgagaagaggaaatatataatgaataattaaaactttataaaattttatgtttgactaatatacaacttatgagaaaggaatggtggtagtatagagaagaagtagaaaaatggcaggagatgagatgtgacaagtatgcagggcccaaaaattaaaaaattaagtaaagtacaagaggagaagcaaaaaatataaagtaaaggaaaataataagatataaaagaaaagcatcacttagacaaagacaaggagaagcaggagaacataaatatataaggtaatggagaacaccaaaaagtatgtaatcaacagagtcaaatattacagagttttatctgttcagttcaataaataattaagaagtccataatatgtaccagtgactggaatatgtgaaatgcaaagcatttctgaatttggacattgggctcattggtagcttttatcagagcaatggcaacaaaatagaggtcagaaactaggtagtagtgagttaaagaataaatgtgagacgggaaagtggagacagcaattataaaatggtattttaaggattttggttttgaaggggaggagaaatgtagtacattagctaaacttgaacaaagggttgagtgaagggactgaaaattggaaaagcttccatatcaatttaagagtgtggttgataaggtaagaaagagggaaggaataaacaatggtttaaaatacaggggaaaatgaaagaattaaagctaacctgaatttgaaagcaacactttaccactgaagactaaactaaagacttaaatcagtatagatacagataatgttgaggagtgctggaaagaagtataggaaactcactactgctggtctcaattgttttgtgtgaatggagacttattatctgttgatgaagaggcaattgtttcaggtggcttgagaaaagagaggagactatggatcatttaccatgggaaatcaaatagtaaataaattgggggtatataaatggatttcaagcaatgctgaatgtttgccacagctttttagtccaaaataaaatatgactccaatagaagtggtcatatagtttttctacaatacttaaaatgcatagtattttatcttaaaacgaattttgcaaatggatccaatattgagatatagcagagttaatggaaaggagtgagaaggtgccttatagattaagatacactgggccaaaggatggcaaactataggctgcaggtaaaatacaacttgccccctttgtgtaaacaaagttttattgaaacacagccaagttcatttgtttatgtattgtttttcattacttttgtactataatggcagagttgagttgttgcagcagagacattttatctggccctttacggaaaaggttttccaaaccctctgctattttatcctattatagtaagaaaaatgtaatgcagtatctcaatgtttaagatattaagactgaagtttattttcattcatgttcactgtcaatgtagatcagaagggactttactcattgtattaattgtaagaatcaagtgacagaaacatcattttttttcatgtccttctttaatcgcggtatctttgggaaagagaacataaaaattcacacaatggcttttaaaacttctctctaaagtggaagatattacttccacttttattatagtctcctacgcaatcacatggccacagttacttcaaagaggaagggttgcgcagtcctatcaattgtccagaagaaagaaacactgaatatttgtaaacaatccttatgagaaccacagaaaccaaagaatagaaggaaagtgaaagtaagaattgaagttatatgtgatgagaacattgccagttatggaaaatcatgaagtatgggatgactttggagaagaagggattaagagcccaggaggtacaaatatgtcagatgagaatatagtgaagggaaaaataagtgatataccagaaaggatactatgatatgttcattttaatgccattttgtattatgctaaggacaaataaataacacccacttttaaatgtttatataaatgattaattttaacggatacttatttctgcattatccatatatcctttttcttttcagaaaaatcatgtgataatccttatattccaaatggtgactactcacctttaaggattaaacacagaactggagatgaaatcacgtaccagtgtagaaatggtttttatcctgcaacccggggaaatacagcaaaatgcacaagtactggctggatacctgctccgagatgtacctgtaagttccattcatatcttgacccatttcttaattctgaaatttcttttaaacacataaaaaatagggactcaataaaaccaaatatttgtcttattgtatatacaaagtaaggctgttggaagcattctttagttttcgaagttgccgaaactcatattttttgctactcaaaattaaatgtgtatgtgtgtttatgaatgtatgtttccctaattaataaattattccaatatctgaattaaaacactagataaaaataatgtcatctaacacatactatattagttatttattgcattgtaacaaaataccccaaaaacatatttacttaaaacaactaacctttattatcttacagtttctatcggtcagtaatctcaaaatggcttatataagtagttgtgaatcagactgtcttcttgtgttgcaatcaggatcatggcccaggctacagtgatcagaaggcttggctgggaaggaggatctgcttctaacattactgacacacatggctgttgtcaggaggcctcaggtccttaccacataggcctttccatgagttgataaatggcagctttctccagcactgctaatctgagaatagaggaagccacaataccatgtattagtgtgttctcacactactagaaagaactacctgagactggataatttatgaagaaaagaggttaaattgactcacagttccacagcctgtacaggaagcatggctgggaggccttaggaaacttacaatcatggtggaaggtgaaggggaggcaagcacatcttaccatggcagagcaggagagacagagagcaaaggggaaagtgctacacacttttaaacaaccaggtctcatgagaactcactcactatcatgaaaacagcaagggggagatccacctctatgatccaatcacctccctcaacattgggaattacaattcaacatgagatgtgtgtggggacacagagccaaaccatatcaattatctactcacacactgttaacttcagccatatctattctttcgaagtgagacactaagtccagcatatatccaaggggagagaaattaggcaccactatttggagggaggagtgttgaaggactccaagtcttagtcatttcctagtgttggaggtaatttccaaaaatcatcacatgtagcaaaataccactcaagtcaatagagtattttatttctgggatgctcctttacccctttttaatgttttttctatctctacaatcaaatttcttttctttctatctataagtacatagacaagaagtactacacttaaactatatattccatgaaagaaaaatatgatacaaatgattgattaatgacttcaactttaattcctggcataattccaatccctaagagaggaagctattatcagtatgaaacatttcagtgtgcataagaattatgaggaaaatatttaatgattttatggttggcttatgacaatgtagttcagcccaaatgtatctaaaccaactgagacccaactatatttggatttcaattattaatgtttgacaatgaaccatctggagttctcatggacaagatagaggagttgatgagttatatggtttatcagtttttaatttcattaaataaccatatctaattatcagacgcatgactttattctcaggcctgcttcattactcacttgtgtcattgaacagtttaatgatttaggggaagtgcagtacaaattcacaattggaatgatacagaggatgataataaggaatctgcattagggcagttcagcattcaaagagactcttatgtgctaagctgaatctaataagatgaaatttaacaatgttgactctaagatcctggacttgggtcaaataaattacagtatgaatatattagcagcagttataaaaattagtgaatatttttatcaattttaagatctgtttgagccaactttatgatggaaacaccataaatgctgtgaaaccaaaaactacatttgtagaagtgtaacaagtagaatgaagctatttgaagtccttctattctcagcgctgatgagactctctgtgggtactaatatttgcttcaaggaatcaatttgtaaaagggataaaaacagatgtaaatgtgaccaaattagagaatagctaaatagctcgagcctgtggtaatgttatatgtttttaattatgcctcctttttattccttttggaaagaaatctcggtggacaattttattttatgaccttctgggaaataccataataagatggatactcatacttgctttgaaatcaaccacaagctttgaaatctctactctaccatttaatgtgaaattcaattgaggcctttaaggcacagctcccacaaatccaagactcaagctttcccaatgcagaattattgttaaataatacatgtctcaacaaatcatgatgaaatttgtaaaatccaatggtaaatagaaaatattccaaatctttaaaaagtggtgaggaaaaatgtagaatgttacttaaaagaaataagactaagtaaatgttttaatttcaacactgggagcttcagataaatagggaaaaaaatctatcaattataagatatatggattgtaggccaagaaactatactgaaagaagtatcattcactagtctttattagagaaatacatttaagatatacaattattcagtttataatccacataataaatgtagaaactacatgaaaatttctctaatcaaatacaaaagaaaataaatcacagaatttaagaaagatggagatgtaaaagaatatttatatgtgtgtgtgtgtatgtgtgtattgaaattctttttaacctattgcataaggtttattgaaatagaaacatatttcatggaaaacattaataccattttgttattgaaagtactagataatctacaaataatcccatgaaaagagcaaattttctgaaaaatatataaacctgttaatataataaacaagatagcactcaaatgtatttgtcaaaattaatatataataactcagtaaaatgtaattatattgtaccttacttaaatatattttatgacatcaaaattatttttctctccaattaaaattagaaataaacaaaaaagttaatcaaaatcttaactatttggatatgaagaaatatttctagtctgtttctctggttaaatacagactggagaacttggcttaatgaattgtttgaggcatgaattaactatgttatttttctgcgcggtatcatcaaagaaaaatttttgtgtttctctatatttttacgttgtctgcaataaataggaaagagcctaatttatttatttacttatttatatttttcgagatggagtctcactctgtaacccatgctggagtgcaaagacacaatctcaattcactgcaacctctgcctcctgggttcaagcgattctcctgcctctgctttctaagtagctggaattacaggggcgcaccaccaggcccggctaattttttttgtatttttagtagagacggagtatcaccatgttggcccagctggtctcgaactccttacgagtgatctgcctgtctcagccttccaaagtgctgggattacaggcgtgagccactgcgcccagcccatgaattcaatctaaaacaaataaaaaccttaaatccctcaaaatactacttccttacattgaattgttctgagaagaaaatgcagggctcttgtttactgatgagaatagaaaaaaaagaaagaaagaaagaaagaaatacatgagctaagcggtaaaattggcatatttctcaaccgaaaagcttatttaattaaccagggatagggtatgtgtatttaagggaaatatattaaataggtctgtgcatttttctttctggagagccttcatacaaatttacgcatcatgtgatccacaagacataatttcatcttcattaacaaagaccttcttgttacatatctcagtcatctgagttctatcatttgttttgacctagaaaccctaatggaatgtgtaattatactaagaagagaatataattcagtgataaaaatttatctctaatatgagtgtttattacagtaaaatttctttatactttttttaaaatttttattgcaagtgaaaccttgtgattatccagacattaaacatggaggtctatatcatgagaatatgcgtagaccatactttccagtagctgtaggaaaatattactcctattactgtgatgaacattttgagactccgtcaggaagttactgggatcacattcattgcacacaagatggatggtcgccagcagtaccatgcctcagtaagtaaacctctgaactgctatatatatgtataaaactttcaaagatcgaagaaaggagagcacataagtgattacacctgtcttatgtaacagaaatagggccaagaaaagagttgttcaagcaaagtgaccaaaatagatcttttctattatgagggtttcttcttgaaaatcacaggagaaataaatatagggactttatgagaatatctatataatttatacatctattaattataaaaactaaagataagtaatattgaatattgatatttctttttgtgcaaacctttgttagtaactttagttcgtcttcagttatacattatttttggatgtttatgcaatcttatttaaatattgtaaaaataattgtaatatactattttgagcaaatttatgtttctcatttactttatttatttatcattgttatggtccttaggaaaatgttattttccttatttggaaaatggatataatcaaaatcatggaagaaagtttgtacagggtaaatctatagacgttgcctgccatcctggctacgctcttccaaaagcgcagaccacagttacatgtatggagaatggctggtctcctactcccagatgcatccgtgtcagtaagtacactactctgaaatcctagcatgttcatgtctttctaagtaacatagatgacattctaagactcatctatattaattgtggcaaaatgtttatgtcaccttgttttaccaatggacctatttagtttttggtttttcaactgtgtataaatgaatatacaaatttcttgataagtacatagtaaaataaattctcctattaatgggcattagtcaagaatacagtaaaagaatttgaacacaatacttgttggttaaatgaagtcgtattgaagcggcatcattgtctgggtaaatatctgaggttcgttatctcacaccaagaagattaaggacgtggacacacacaaggagtgagtttaggagcacaggtttaataggcaaaagaaagagaaaggagaacagcttcctctcttgtgagagagagcggcacctgaaagtgaatccctgcccctggtggagtgcactggattttataaacggtcttgaggaagcagtgtctgatttacatagggcccaaagattggttaaactaggtgtgacatttacataatatgccaggaagctggccgccccaccctaatcttattaatcaaatgggatctttgcctggccagcgccatgttgctttctccttactgtacacgtggctggcaaagagaaaggaagatgcacctgccatatgaacatgcctagtcccaggtagccttttcctattggcacaactgctggcattcaccttgcaagcttccagcttgcttgtctatgtttgcagttcgattttacaggctcctcttgttagaaaagaaaatgatttgggggctgcctttcattaaaaggaaaaaccttatcaaggactgctgtaccctcattatctgcctaaacaattttttctcaactcctatatcaatattaatatgtacattggaatcaatcatttgactcaaaataattatacaattatagtttaaaatagaaagtaaatacgatgatacccaataattcatatattcaagcagtgatatgacatttttacagtaaagctatttgactttctctagtatatgtaagtacaaatgggtattctgagatcttgtgcatattctactctagaaggtttcctacagtatttattccaacatacatttatatcaacagttacttctttttttacatgttaatgattggtgatgtcacattttaatatttacaaattgaatggctataaaatgttataacattatagtgtaaatttgcatttcttttaccactaactgggtttagaatatatattcacagtttaattggtatttaatgcttctaatctttggaaatgcagtttgattttctttatttacctttttgagagttttggtattattagttggaatcatcttaacaattctgaatataaaatctcttttaattatacgtaatgcaaatgtattctctttgtggctagtatttttctttccttttttctgcattatgaacataagttgctcattctactacataatagtcaatcttttttcatgatgaatgtttcttgtttctatttaaaggaatacttcaaaaacatagagccactatactattctttattctaaaaagttataagttaccttttcttttcatattttaaaaatattttgtgttgattttattcatgataatggctgtatttcatgtttaaatgaaatatggtaaactcaacatttccctaacaatttttatagtacctttctcaaacagtatattttttattgtatattttgtacattgtgtgtgtatacacacacacaataactattactctgagtattctgcactattagtaaacaattttttaaccagcattgcagtaaccctctattgaattttatttatttattttattttgagatagaatctcactctgtcacccaggctggagtgcaatgtcgcgatctcgcctcgctgcaacctccactccctgaattttaattaatataggtttttaataagtatggatatgacttttcaccctaatcatgacctttcacccaaatctttttgcttcatcagtctcttttttgtctcatcattcagtgtcagatgatcccattacttttatttttttcttcacagattaattgaggctaataatatgccttgattagatatgcaatttctcctgatatcaaacaactcaatcaacgtttatgcctcttggtttgattttggagctgattgtagaatcaactacttattttttctctttctttccttccttccttcctttttctttctttctttttctttttctttctttcttctttctttctttttctttctttctttccttctcttccttctttctttttctttctttcattcttttttctttcttcctttctttgtctacgtttctccttctttttcttttttctctttctttctttctctttcccttcctttctttttctttctttctttctttctctttcccttcctttctttttctttctttctttctttctttctttctttctttctttctttctttctttctttctttctttctttctttctttctctttccttctttctttcttccttccctccctcccttccctccctccctctgtcacctccctccctccctccctccctcccttccttccttccttccttccttccttccttctttccttttgtcccaagtttgtctggctcaagttattcttaagaatgttactattttactcttcatgctagaccctgtactttagtcaggttatttagctactttacggttgtcatataattaacaagtcttagcttcatcttcagattgagatatcaacgttatattttcatgtacagtcaattgtcagtgaatcacattgtttttcaatttaataaaatctaaattcctcataaccatgttgtgagaatatgcagaaaaaattaaacatacttgagtgagtacagtagatatatattggagtgtatcctttatgaatgcaaactggctgtagtttcctttaaaatagtcatttaaataaaaaatttgccagataaatcacagaatatcaatttctcttgacttgtaaaacttgaattactagtgccatctgaatgattcttctgaagatagacagagtagtctctacttacctgtgagagaaaaaagctgcactagtccctcttattcatgtgggatatgttccaggctccccagtaaatgcccgaaatgattaatagtataaaacccaagtagactatgtttttccacctgataacttggaatactactaagtgactaacaggctggtgcatacactagacgaagggaggattcatgctctgggcgggatggagctgaatggcataggatttcatcaaagactactaagtgactaacaggcaggtagtataaactgtggatgcactagacaagaaagtattcaggctctggggagaatggggctgaatggcataggatttcatcacactacccagaacacctttttttattgctaagtattattccattatatcatgtatcacggtctgttaatccattcatgtgttgaagggcatttgcattgtttttggcatttgtgaatcatgctgttaagaaaaatattcatctgcagtttttatataaacacaaatttattcctcatggatacatatctaagactgggtttgttagataaatggtgtgtgtgtgtgtgtgtgtgtgtgtgtgtgtgtgttttattattattatactttaagttctgggatatatgtgcagaacgtgcaggtttgttacataagtatacgtgtgccatggtggtttgctgcacccatcaacccgtcatctaggttgtaagccttgcatgaattagctctttgtcctgatgctctctctcccctttccccgcacaccccaacaagccccggtgtgtgatgttcccctccctatgtccatgtgttctcattgatcaactctcacttatgagtgagaatatgtggtgttttgttttctgttcctgtgttagtttgctgaagatgatggtttccagcttcgtccatgtccctgcaaaggacacgaactcattcaatttatggctgcatagtattccatggtgtatatgtgccacattttctttatccagtctatcattgatgggcatttgggttggttccaaatctttgctactgcaaatggtgctgtgataaacatatgtgtgcatgtgcctttatagtagaatgatttatattcctttgggtatatacccagtaatgggattgctgggtcaaatggtatctctggttcttgatctttgaggagttgccacactgtcttccactatggttgaactaatttacactcccaccaacagagtaaaactttcctatttctccgcatcctcgccagcacctgtggtttccagatgttttaatgatcggcattctaactggcgtgaattggtttctcattgtggttttgatttgcatttctctaatgaccagtgacaataagcttgttttcatgtatttgctgactgcataaatgtcttcttttgagaagtgtctgttcatatccttcacctactttttgatggggttgtttgtttctttcttataaatttgtttaagttccttgtagattcttgatattagacctctgtcagatggatagattgcaaaaattttctcccattctgtagattgcctattcactctgatgatagtttcttttgctgtgcagaagctctttagtttaattagatcccatttgtcaattttggcctttgttgccattgcttttggtgttttagtcatgaagtctttgcccatgcctatgtcctgaataacctactgcctaggtttttttctatggtttttatggttttaggtcttacatttaagcctttaatacatcatgagttaatttttatattaggtgtaagggaagggtccagtttcagttttctgcatatggctagccaattttccctgcaccatttattcaatagggaatcttttccctattgcttgtttttgtcaggtttgttgaagatcaaatggttgtagatgtgtggtgttatttctgaggcctctgttctgctccattggcctatatatctgttctggtacaagtaccatgttgttttggttactgtagtcttgtagtatagtttgaaatcaggtagcgtgatgcatcagctttgtgctttttgattaggattgtcttggctagatgggacctttttttggtttcatatgaaatttaaagcagttttcttagttctgtgaagaaagataatgatagctagatgggaatagcattgtatgtatcaactactttgggcaatatggccattttcatgatattgattcttcctatccatgaggatggaatatttttctatttattttggccctctcttatttccctgagcagtggtttgtagttctccttgaagagttccttcgcatcccttgtaagttgtatttctacgtattttattttctttgtggcaattgtgaatgggagttcactcatgatttggctttctgtctattactgatgtataggaatgcttgtgatttttgcatattgattttgcatcctgagactttcctgaagttacttatcagcttaaggagtttctgggttgagacagtggggttttctaaatataccatcatgtcatctgcaaaaagagacaatttgacttcctctcttcctatttgaatactccttatttctttctcttgcctgattgtctggtccaaaactcccaatactatgtccatcctagacagatcaacgagacagaaaattaacaaagatattcccaatttgaactcaactctggaccaactggacctaatagacatctacagaactctccaccagaagtcaagtgttcttcttggcactacatagcacttattctaagatcgaccatataattggaagtaaaacactccccagcaaacgcaaaagaacaaaaaccacaacaaacagtctctcagaccacagtgaaatcaaattagaaatcaggattaagaaactcattcaaaactacacaactacatggaaactgaacaacctgctactgaatgactactgagtaaatattgaaagtaaggcagaagtaaataagttccttgaaaccaatgagaagacagacacaatgtaccagaatatctgggacacagttaaagcagtctttagaggaaaatttatcgcactaaatgcccacatcagaaagtgggaaagatctaaacttgacaccctaacacctcaattaaaagaaatagagcttgatggggatggcattgaatctataaattacctttggcagcatgccatccccatcaagctaccaatgactttctttacagaattggaaaaaactactttaaagtttatatggaaccaagaaagagcccgcattgccaagtcaatcctaagacaaaagaacaaagctggaggcatcatgctacctgacttcaaactatactacaagcccacagtaaccaaaatagcatggtactggtaccaaaacagagatgcagaccaatggaacagaacagagccttcagaaataatgctacatatccacaaccatctgatctttgacaaacctgagaaaaacaagaaatgggaaaaggattccttatttaataaatggtgctgggaaaacaggctagccatatgtagaaagctgaaactggatcccttcgttacaccttatactaaaattaattcaagatggattaaagacttaaatgttagatctaaaaccataaaaaccctagaagaaaacctaggcaataccattcaggacataggcatgggcaaggacttcatgtctaaaataccaaaagcaatggcaacacaagccaaaactgacaaatgggatctaattaaactaaagagcttctgcacagcaaaagaaactaccatcagagtgaacaggcaacctacagaatgggagaaaatttttgcaatctactcatctgacaaagggctaatatccagaatctacaatgaactcaaacaaatttacaagaaaaaaacaaacaaccccatcaaaaagtgggtgaaggatatgaacagacacttctcaaaagaagacatttatgcagccaaaagacacatgaaaaaatgctcagcatcactggtcattagagaaatgcaaatcaaaaccacaatgagataccatctcacaccagttagaatggcgatcattaaaaagtcaggaaacaacaggtgccggagaggatgtggagaaataggaacacttttacactgttggtggaactgtaaactagttcaaccattgtggaagtcattgtctagatcctcagggatctataactagaaataccatttgacctagccatcccattactgggtatatacacaaaggattataaatcatgctgctataaagacacatgtacacgtatgtttattgcggcactattcacaatagcaaagacttggaaccaacccaaatgtccaacaatgatagactggattaagaaaatgtggcacatatacaccatagaatactatgcagccataaaaaagaagagttcatgtcctttgtagggacatggatgaagctggaaaccatcattctcagcaaactatggcaatgacaaaaaaccaagcatcgcatgctctcactcataggtgggaattgaacaatgagaacacatggacacaggaaggggaacatcacacaccggggcctgttgtggggtggggggaggggggagggatagcattaggagatatacctaatgttaaatgaagagttaatgggtgcagcacaccaccatggcacatgtatacatatgtaactaacctgcacgtagtgcacatgtaccctaaaacttaaagtataataataataaaaaaagaattagagaagcaagagcaaacaaattcaaaagctagcagaagacaagaaataactaagatcagagcagacctggagatagagacatgaaaacccttcaaaaaatcaatgcacccaggagctggtttttagaaaagattaacaaagtacactactagccatactaataaagaagaaaggacagaagaatcaaatagacacaataaaaatgataaagagggtatcaccactgatcccagagaaatacaaactaccatcagagaatactataaacacctctacacaaataaagtagaaaatctggaagaaatggataaattcctggacacatacacgctcccaacactaaagcagaagaaagaagtcaaaaccctgaataggccaaacacaagttctgaaattgtggtagtaattaatagcctgccaaccaaaaatagcccaggaccagatggatttacagccaaattctaccagaggtactaagaggagttggtaccattcctttggaaactatttcaaacaatagaaaaagaaggtctcctccttaactcattttatggagccagcatcatcctgataccaaaacctggcagagacacaacagaaaaagaaaatttcagtctaatatccctgatgaacatcaatgcgaaaatcctcaataaaatactggcaaagcaaatccagcagcatatctaaaagcttattcaccatgagcaagtcgccattatctctgtgatgcaaggctgtttcaacatatacaaatcaataaatgtaatgacaaaaaacacataattaactcaatagatgcagaaaaggccttcaataaaattcaacaccccttcatggtaaaaacactcaataaactaggtattgatggaacatatctcaaaattataagagctattttttaaaaacccatagcaaatatcatactaaatatgtgttcatttttataagaaatagacaaactgttttcctgagcgatcatacattgtaccttcacatactcagtgtatgtgagatccagttgtttcgcaaccttgccagcctttgagataatgtgtttttttttccattaaattatccattctaatatgtgtgtgatggtattgcattccctagtgactaatgctgcttagcatcttctttgtacttatttaccatctatgtacctcctttggtgaacactgtctaaattttgcccactttccattgagttgtttcttccattacggaattttgagactacatgatatattgtggctacaagcccttcactgagtaaatattttgcaaatatttttcttgcatctgtagctttacttttctctctaatagtctcttttcatgagcaaaagtatgtaattttgatgttatcacatttttcatttatagattacgctctttgtgtcatctaaaatttccttgcctaaaccaaggccatatacagttctagaagttaacattttacacttagttatatgagttaatttttgtatgaggtatgaggaatatgtagagggttattattttgcatttggatgcgttactgttccagtatcacttgtttaaaagactatgttttctttattgaattgcctttgctccttttttaaattgaaaacatcctcaaaaaatttttaaaaacagttaaggaggaaaaagtaaaattcaactaggcttgtaggacaatcaatggtaatcattaggctagctttccattgacccacttccttatagctggtcactgattactagtccaggataacataatctttgtcactagaatctttgttctttttctgttctttagttaaaatttaagacaatatgagatgacaaactttccatttgagtttctcctttaggttctgcatactaacaaaactactgatgccagccattctgaaaggcttgacaagaaactcaacttagggaagaatgtactttccatatcctgatgatttcagcccccttacccgaatcaattgatgacctcaattttccagccactcccccttcaaagattcttgcccagaaagcttcagtgaaatgggtttgagtcttgagaattcttctcatgtccttgtttggtgaccttgcaattggtaaactctctgttgcaaactccactgtcttggtatattctgttgctgcacagcaggcatacaaaccttacaatcttataaaaattcatggcaagcacccagacatgatggctcacacctgtaatcccagcactttaggaggcaaaggagggcagattacttgaggtcaggagctcgagaccaggctggccaacatggtgaaaccctgtctctactagaaatacaaaagttgcccaggcatggtggcacatgcctgtaatcccagttacttgggaggctgaggctggagaatcacttgaacctgggaggcagaggttgcagtgagccaagatcgtgccactgcactccatcctgggagacagattgagattccgtctcaaaaaaaaaaaaaaagaaaagaaaaaaaaattcatggcaagccactctccttgcagtcatttacctacagtccagtgcccccatgccactggggctgacccagagagaagctcaagaagctgcttagttatgatgaactaagggccttagctggggccttctgtgttggcagggcagtgctgactttcagcacacaaccttgtctgcagcagagaaaccatttctggtctcagaagaagtctcaggtgagttttctcagagcagctggcaccccatttccttctgtgtgtgtgtgcctgttttcgtcttagaggtcttgtggcctctttgaggtcttgttgacactccctaagtctaggtaggaacttatttgaggagatctcccttcagatggaaaaagactagagggcattgcttgggagaaatggtcttggattttggaatctgaaactttatatggaaaggtcttttgtttgtctttgtcttgttatatgtatttatgtttgtggaggggatccctgaagaaattactagtggaagaaattactaactcagggaactcttcttgtttggtcagtcacattcagttagtcctgaaggagttgctagtggaatctcagcaagcctaactcagggtaatcatctgctcttcaatctttcccaggctttaccctctgaacttctgatcgaaggtcatccctctccagcttgagtggatcaaagatgacaagggccaatggaaccaagtttgagtcttgccaggtcaatacttgggtcctgagtatggtgactagtatctgttttgttatgtgtgtattattccagccagaatgggaaatgctaattcagctcctccaggcagcccaatggggctggtggctttgagattattaaactctttctctgctgcaaaccccactgtctcagtgtattgttctgttgctgtgcagcaggcatacaaatctgacaatctcgtaactatttgtggcaagccaggtcgaggtcactctctttgagggcatttactcactgcctagtgccccctttccactgggacagacccagagacaaaccctagcagcttacttagctctcatgaactaagggctgtcccttagttctcccaaagtaacccacaatgcaaccctgatgggctgcatcttccaaaattgaaaggcctttgtctatcattccatgaaacaaaaaaagattatcttactttttaacatggcttaaccttaatacccactggatttcggagaacagtggccactgcatggttctcatgcttacagtacgatcctgtagctagatttgttttgtaagaaggaagaggaatgagatgaaataccctatgtataatgttttatgttgctttggaaaagtacaacaatgtagaaaaaggtaaaatcatgataaagtaagaaattaaagactgtttggactgatttacaagaaaaagatgatgctatgatggttcagttaaaggaacctatgactcacccccctccactttatgggggagctgcagcagcactactggcgcctctccagagtccccaccaccaaaaagtcacaaatccggggcaacaggtatgatctctacttcttataacccaacaggggactccatttaggcagggtgtcacttcttatacccaacagggaactccatttagccggggagtcactctggttctgagaggcagtttccccataacaactgcttacaggaggtgttgctgccacaggccagcctataggatttatcttggtttattctctgttctccacttccaacctacttaattagaaaaataatatgcctatttattgagaagatctaaagtttatggaaggaacaggattgaaaaaaaaaaaaaaaacatccaaagcatatgaagaatctattctcctctgtatttgccacacagaaccctacctgagcaggcacccccaatttgctcaatattttgttgacttcagagaaacaaagaatggttttagaaaaagctaaggaaaaggctgatcttattcacactgactctcccagtaatccagtaagggcagctgctcagattgcagttcccacctctgacctgggatggaatataaacactggagatagatctaaccttgaacactatcaaaactgcattttgatcagcctctgcaagggagtgcccaagcaaaggagtctcagtaaggtccaggatggtcaagcagaagcctaatgagggttgctttggaattcttagaacaagtctttgaagctttcagagaataaatggatattgacccagaagccccagaaaatttgatgatagctaacatgatgtttatccaacaaagtgccccagatattcagagaaagttacaaaacgtagctgaggcattggacatgtttttgtctcaattagtgaagattgtttttaatgtatttactgatcacaagtttaaagagtggaaaataaaacacaaggaataatgaaaatggcaagctgacttgttatctgtggctctgaccctagtagtccctggaccacaacaagggccgtcatcagacactccatctatggtagaaccacctgggcccccaaaggccaataaaaacggacatcccattgcaggtcccaaccagtgtgcttactgcaacaggggggacactgagtggaaaatttctcatgccctacaaagcctgatgttaaacagtcagccttctgcccaccaaatgcctgggatagctggggagcttgagagagatactaaagaaaaagaccagaaatggtagcacccaggggcttctcctgacccagacaacaccctccatatttcccacatggggcttgagatcctgatgatggtgagaaatcagcttctggactttctagtagacatggtgccatctatttggtgttaaatatctggtggtctaaactttcctcagaaataatgaaggtgactgaaatctcagaaaaaatgctgatgagatcattcctccaaattttggattgtcagctagagtaagatcatttaaagcacagttttttgctgggcgcggtggctcactcctgtaatgccagcaccttgggaggctgagatgggcagatcacaaggtcaggagatcgagaccatcctggctaacacagtgaaaccccgtctctgctaaaaatacaaaaaattagtcgggcatggtggtgggcacctgtagtcccagctactcgggaggctgaggcagaagaacggcgtgaatcggggaggcagagcttgcaagtgagccaagatcatgccactgcactccagcctgggggacagagcaagactctgtcaaaaaaaaaaaaaaaaaaaaaaagacagagtttttctatacatccttgaatgtcctatccctttgttggggaaagtcttccttttttgttgttgttttgttttgttttgttttgagacagagtcttgccctatcgcccaggctggactgtggtggcacgattgtggctcactgcaacctctggctcactgaaacctccacctcacgagctaaagcaattttcctgtctcagcctcccgagtagctgggattacaggcgtgtgccaccacagccagctaatttttatatttttagtagagacagggtttcaccatgtttgcctggctcgtcttaaactcctgacatgaggtaatctgccctccttggcctcccaaagtgctgggagctgggattacaggtgtgagccactgctcccgtcctgttagggcagtactcttaaccaaactaaatgctaagattactttttctctgagatgattggacatccaggtgccttcagaccaagcatgtgctctgcaggccatattattacaactggagatccttgaaagtgcctgcacccctgaagagatactccaaaaggttagtccggaaacatgggcagatgggaggccagggaaaacaaaaactgcatctccagtacaagtcaagttttgtgcaggagtggcgctgccaaatctaaagcagcgccctttgagagaaaaggcacagcaatgcatttagcctctgctaatggccttcctgcaatacaggaagaattccttgtttctcatgtaacatacctgtcttgccaggacaaaaacatggaactgaggattattggtttgtacaggatttgagggctactaggcaaattttcaaagccatttatctggtgataactgatgcttatacattattcatgactttaaccagtgagttgtactggtgttcagtcttgaatctgaaggatgccttcatctgtattcccctgagtccagagtcccatgaagtgtttgcctttgaataggaagactctgacactaaagctaaatgatagtattgctggatgatgctccatcaaggcttcaaaaactcactaaccgtccgggggaaatacatgctaaggagttttgggacctccaattgaaaaatgagactttgcttatatatgttgacggcatattagaagccagcacaactatggcaaattgaccagaatattatactggctttacattttttttttgtctggatggggatccaaagtatccaagaaaaaaatcacaaatattgaaaaactcaattatatattttaggtttgaattttctcaggagcagagtaatctgctttcggactggagagaagctcttgtcagggtggccagactcaggacatggcagcagctgtgaggggtttttaggtatggctgaatgttgccatatttcattttcttattttgggcttatagcaaaatgtctctatgaagccctaagaccagacacttgacttctagaatggacaaggaatgtcaaaaggcctttctaaccattaagtaaaaattactaatggatctggctactgagaccccctgaactaagaaagccatttgatttgttcatacatgagagagaagggatgggtttaggagtagtaacccaagacttggggaatatcatgaggcctgtagcctacttttcaaaacagctggacattgttatgatgggttggacttcttatctctgagccactggcaccacttgtgatcttctccaggaggcagaagagttcactttgggttaacctagcactgtacacaccccatactgtgtatgctatttgttggaacagaagtggagctactgacttacctctagaagactgaataggtatcaggtcatcctcctggataatcctagtgttactttgagagctgtttctgctttaaatcctgctaaataaacctatacatgattgcatataaattactgagcaagtgtgttctattcaaccagacatgaccaaaattccctttaaaaacctggacttaaaaatattcactgaggaaagcagctttatgcaccacggacaacagaaggctgagtatgctattgtaaccctgtgacagatcctagatgcagagacactccctctgggttcatcggcacagaaggcagaacttagagtcctaatcagggcatcccaactaggtaaagactcctgagtcaccgattactctgattccaggtatgtttttattgttgtccatgctcatggggccgtttggaaagaaagcgggctcttaacctttgatgattaaaaaagaaaaacaattaagcatgctaaagaaatcttagcctgactaaaggcagtcttggtacccaagaaagtagctataatacactaccatggacatcagtggatggacaatttggtagcaagaaaaaaaaaatcactaggcagagcaggccactaaagaggtgaacagagaaaaaaatgcccaaagccttcctaatgccattaatccctgaaataaacttcagcctaaaatccctacctaatggaagaagatgtaaagagagaattcgattgagactttgactccaatcaaagaactcaaaatgagtggatatgtgacacggaagaaaaggttctggtgcccaagtatcttgtgacagatatcatcaaacacatacatgataccacacagtatggcaggcatgccacccttcaattgatccaggactatgtctttgggacacacttaaagaagactatccaaaaaataatttaaaaatacctacttggtgcccagaacaatcttaagactggtcctccacccccagtaccaaggattcaagcaagaggtgcagggctattagaggactggcaaattgattttaccgtgatgccaagggtagcaggaaattttaaatacttgcttgtatttttagatacattttcaagataaacaaaatcattccgctgcaagaccaagagaatgtctgagctaatgagagccttggtagagaagattaccctcaggtttaggtggcctgtctccatccagtgtgaccatagtgcaatttctgtagcctaggacaccatatattccaggccctcagcataatctggaatcttcatacagcctgcagactgaagtctactgaaaaaactcaaaagataaatcatactatataaaacaaaacaaattttagctaagatttgccaagaaactaacaacctggaataacattctgtccattgccctgctcagagtaagggtggtccctaaaagtgggcttaaattaagccctttaaaaattttacatgggagatcattcttccgttaccttctcagactaaggaatgccaataacatacacataaataaattagatattatcaaacatacacaatctttaggttgtactttaactactattcacgagtttgtggttccagcagattgtggtatccaactgacattctctttcatcccatccaacccagagactgggttctgctcaagaccaggaaaagtcgacatcctggggaccacttaaaacacagtgaaagaggccatgcaaagcatgactggtgacccattcctctgttcagcttgaaggacttagaccctggattcaccacagccatataaaacccgccccgccagattcttgtcctatcaagaaatgtagagaggccacttcaacttcagagactgtctcaaccctatctgaatggataagtaaatctttgatgggcctcaaatatcttttgaggaaaaatatcagataagtaactttaatgaaattagacaaaacatatgtcttcttgacaactacaatagttactttgagcataacaggaatgtttgttattataattattttatataaaaaggtgagataccttcctgtctattccctgccttactgaatgcttaagccatatatttacttggtcattataattgcctagataattacaattgctacccttatagacattacttcataattgccttggtcaatacaattgttagacttatagattttctagacattctatgccatgctaacatagtctcatgccactcattatgtggacattctaaaatttagaaatggtcactcttgttttaaaacttctaattatacctctcctgttactacagtgcctagacaggcatagcaacactgtagttcaactgtttcaaggtattgccactggaagaaacttaccagaatgatggatctgtcagtaactcccccaaactattcaaaataagcattttctgttagtcatacttgtcactgactttctggatgttccaaatatgactacctatctgcaccagcttctttccatggctactttccaggtccaagtaatagtacaccaagaaatcaccaccccatgtgtcaatctctctctgcctatcataaatggaaagtcattccattacataggccctccatggcccatggcatactgggcagacaaacgcagctaggagaagggaaataaaactaaaagtttctccttactatgccaaaaatatttacagtggggaatatcacacaaattctggggagcctgtaaaaaaagatccctagttcaattccatttgtctatattccccatgaaaaaatccatcaataaatgcacccttgagggctttacctgtgtgcccccttggtacatgtttatttgtggcataggatcagaccctcctctgttagggcaagcccactggtgtctcaataacctgtatattaagggctctcacttactgagatacttctcagtccatcctaatgacaaaatattctgcccattttcccaccgactccaaaagggactgccaggcatatatcaatatatctggtggcagagccttctaggcatcacgagtcctagctatggagtatacactcactgggacatgatcagaaacttattggcaaccacagaaataattgcaaaagaggctgctaagaacattgaggctgagaaaactcttcaaatttacttgcccagatagttcttgacaacggaactacacttgattttctcttggctttacagagaggagtctgtacagtgatcaataccacctgttgtacttatatcaatgcttctggtaaaataaaaaccaaactaaagaaaatatttcagcagtctcgctggagaccatatgtctctaccacagaccctatgtctgaatagttttttgagctttccgcctgcatactccatgttttccagtccatttttcaaggactcttgaagttcaagctcacaattctgtttatagggattataatttacatgattcaattaaatattacaataaaaccatagactgaagtactaacatgttcatccagcaccctaagctgggtataacagcttgcaggttgttacaagacggtttcattcctctaatcctgactctctctctgtgccccgtgtcagcaaaaagaagctagaatggccattgcccgattcataccatattagcttttacacctcagaattgagaagggatcaagcccggaaggaactgaaactgtccctaggaaagttatataaaattgattaagggggaaaaattcaactatgatttcaggaaaatcagcagtaatcactaaatcagctttccatttgtccaacttctctgtagctggtcattgattactaccctaggataaagaagcccttgtcacaagacattttggtccttttcctttctatagataaaatctaagacattgtgagatgataatctttctgcatgagtttctcctttaggttctgcatatgaaaaaaaaacctagcaacatactggtcaacaaggcaaaacctcattttcacaaaaaattaaaaaattagccgggcattatggcacaggtctgtagtaccagctgctcaggagatctgaggtgggaggaccacttgagcctgggaggcagaagttgcagtgagctgtgatcacgctactgaaatccagatgggcaacagagcaagatcatcttgctcaaaaacaaaacacacacacacacacaaacatacacacacagacacacagacacacacatcagctggtctaaagagcccagcaaaaagctgactcaggaaataatgcaggttccacatcctggtgacttcatcccccttaccctgaccaattgacaacccaaattttctagcccgtcaccctccatgatccccttaaggtctcttgcacatagccccttctcagaacagatctggggcttgagaatcctcccaattccttgtttggtgcccttgtgttgattaaagcctttctttgctgcaaaccctactgtctcagcgtattggtctattgctaaacagtgggcatgtgaacctgatagtcttataacaaaatagaatagaagctatttataggatcgatccatgcatgtgagtctatttctggacaccgttttctcttctattcttccacgtgtttgtcctttaaccagtatcatgagatcctttactcactgtagctttttttaagtcttaaaatttggtaatgtgagtttttcaacttctcttatcttttgaagaattgtttagctgttttagcccctttacctttccatatgactttagaatcagcatgttcgtatgtgcaaaacattgtgcttggttattcactagaactgggacacattcacagatgaatctggggagaactgatatgtaatagtattaaatttttcaatccatgaatattatatatcctttgatttagtaagatcatacagtcttaccctagttttttttattttaagcatacagatcctgtattttactagatttataactaaatattttgtatttcatccatcaacgaaaaattcaatttgtttaatagacagaatttattaatgctacctaatccttcttgagagagccatgatagtttgtggcttcagtaattttttaattcattcaagttcttgaatttattgacatggcattattcagaatattttttatttttcttttaatatatgtaaaaaccataatgatgtcatttctgtcattgctgttataagcaatttgtgttattttttctgatttagtctgtctaaaggtttctcaattatagagatctaaaataacaagcttttggtttccttgtttatatacatatttacttctttattatttcatctctgatctttattgtagtatttcttctgcttactttgagattaattttttctacttttactaatatctaatggtagaggctaaggttattgaagtggaacaccgtcattttctatcccaggtatttagtgacaccaatttatttcatactgctctagtgccattccacaacttttgatatatagtatatcaatcagtgtttggctggagtagggtgagtattccataaaagatttactgtgatttttggagggaggtgtgaagagggtattattaccaaaatgtggatttttttttaactccattctgtattttggctaagagaagcagctttggaacttctcaagtctgtacatctgtgagaccccaaggattacttgttttaatttttttttaagtttaggtttgttttgggtcaacttagttctttcaaggcttatttttaagcttttaaaaagcttaaaaaaccccagagatagtttgttcagaatattaagctgcttctgatgtctctactacgtgacctagatgttcaaacgagtctttctactctgattgattccatttaaatgtctccctgtgttgtgtgtgtgctctgggaatcctttacctttttgttctctggtagtgttcttcatctgataggtatcctttgtccattcttggggagttttgctctactctccagagtgtcaatattcagccaaataatctagggagttgctgtggaaatttgtagagccctttcactccatagtttcttcttttctcactctgtttcctgcagattctagtgaactcatcttctttgggaacactgagttttgtttcttctactcagcaagtgtggcactttctgctgaattctccttctccatgctgctgtttggaaaatttctcccagcataaagtcactttgatgatggaactcatctcattgtcactttttctctggaattaggtgcttcctgctttccaatgtctgaaaatgttattttcatctattttgttccatttccttatttgtggcaagaactctgttttacttgattattcttgcctggtcttttacctttttaaattgtctgtactgattgttttctatttggtttcttctcatatttggatttgtttcaaaatttatactcatgctggattttgtctggtttctttgttataatttattataaataataatttattttcagtttttattcttttcttttatagctatataatgataaatttccctctgaggattgttcgagtgtcatctcaccaagtttaatttaatatgtttttattatcattcaattcaaaatatttaatgtttcctcttctgattttctccttatccatgagttatttaaaaatgaagctgagttctgggaagcaacctagtaaacgacagtaatttctttttttgggttattattattattattattattatactttaagttttagggtacatgtgcacaatgtgcaggttagttacatatgtatacatgtgccatgctggtgtgctgcacccattaactcgtcatttagcattacgtatatctcctaatgctatccctcccccctccccccaccccacagcagtccccacagtgtgatgttccccttcctgtgtccacgtgttctcattgttcagttcccatctatgagtgagaacatgtggtgtttggttttttgtccttgcgatagtttactgagaatgatgatttccaatttcatccatgtccctacaaaggacatgaactcctcattttttatggctgcatagtattccatggtgtatatgtgccacattttcttaatccagtctatcattgttgaacatttgggttggttccaagtctttgctattgtgaataatgccgcaataaacatacatgtgcatgtaaccgacagtaatttctatcatcagttaacagaaacagtaacttccactctttcaagttaagttctacataatttgaggaatcatcattttggcctttcaagataaataaatctgttactgttcctcgtcttctttgaactccacatgtccatttactttgaagcacacaataagaatgacatttcaaattcttggagccaaaggctatgaaaattattttggcagattttctaagatcatcacaggatctcagatactccaattggctaaatgagatttggaattgccagaagatctacaataggcaagattaaaaagtcctaagaaataatactcattgtctattgagttctgacatgctgtagaattccaaatccattagacaaacagatttccaataatttcttagaaataattgtaagtgtcttaaatagagccttgttttaaaaagtgatgaagagtcttgatgtaatgtctttggcaactctgagcttattttccttgacttaagtatttgaatgcttatggttatccaggttttcagttacaaatgactcattattttttatatttacatattacttaaattcttataaaatgttattgatcatatgcttgtctttttcttattctcttcccttttagaaacatgttccaaatcaagtatagatattgagaatgggtttatttctgaatctcagtatacatatgccttaaaagaaaaagcgaaatatcaatgcaaactaggatatgtaacagcagatggtgaaacatcaggatcaattacatgtgggaaagatggatggtcagctcaacccacgtgcattagtaagtaatttattatgtttgtattgattatccagatgatacacaaaagtttactaactttagtctttttgtgggggctgatataatttcatttgaaaagataagaaaaaaaaacctgcaggaacaaagcagacatcaattttttttccttttcacattaattactcagatattagtctgtctttccattcaggcttttcctactctaaagcattctgtgttacagaaacaagttagggagctttatgtgtattctggtttaaactgattttgctttagctgagacctttatgactgttaatatatatctgttttataagattagacttttacatcaaattctttactcctagatacaaaagcaatgtttttattgaagatatggatgcctagtgcataacatcaaaataatttaaactctataatttgtagatttgacactgtaggatatgtctaatactgaatatcttccctcttagaaatttttcataaatatttaggtagtagagagacaaaatattcctagatggtaccaatttctgctctgttgtatgatttccctaccacactatctagatatttatgaagatttccctaccacactatctagatatttatgaaaattttctgggaacaattggttcaatttgtcttattttttgcaaaaccactcagtaatatgtgtgtgtgtgtgtgtgtgtgtgtatacgtatatatgtatatatatatatatatatatatatatatatatagagagagagagagagagagagagagagagagagagagagagagagagagatggagtcttgctctgtcgtcggccaggctggagtgcagtggcatgatcttggctcactgcaacctccattttccgttttcaagcaattctcctacctcagcctcctgaatagctgggattacaggcaccctccatcatgcctgcctaattttcgtatttttaatagagacagggttttgccatgttagccaggctggtctcgaactcttaatctcaaatgatcctcctgcctctcagtaatatatttgaagtaatatttaatatactcatgttaagtgaagtgaataaggtattcatgtatactgttttcattttttaatgtctgtgcttaatatgaggtctagtttacaaaaaatgttagtcctcataaaaaagctaattttatactaaatttttattaattattcttttaagattttcttattattaaagagaaaatgtcttgtataacataggaatttatattttcagtctttttctcctttttacatatgtctcaactacgaattagtttggactcttaatttacaaaattctgttatgattttctttaaaaaataatgtatacctgtaatggcctgttttattactagcattgtcataaatgctttagtataaatgaattaagaaaaatgtttttaaaatatattttggggcttaagcaatgaaaaaaaatgttgtgtagaaagatatactttcacttttgacaactattttacgacaacaaattctcaccagtcatagattatttttgtacggtacctatttattagtagatctaatcaataaagctttttcttcttagaatgggaaatactcagattgtttattagatgacattagaaatgacattctaaattttttatgcactagaatcttgtgatatcccagtatttatgaatgccagaactaaaaatgacttcacatggtttaagctgaatgacacattggactatgaatgccatgatggttatgaaagcaatactggaagcaccactggttccatagtgtgtggttacaatggttggtctgatttacccatatgttatggtaagtactggtttttcagaaattcattttcaaaatgaaaataaatctgttttccaattttaaaaatttgaattatatagaggaattgttaaggaatgttgattaaaatcaagatatctcctgatttgacataaactgggaaaagaagggagttttgaaaatatctctaaagtagtgcattaaattaatacttcctatgggccacctaccttccagatttgtgattataatataattgcttttgttaccctaaataaaagctttcaaattatttagaacctagcacttattaccaaaattatagttggttacaacttcctcagctaatttgtttttttaatttctactttacatcttctatcttgtgtgttaatttctgtactttctgagtgtagttctttattttctaaatttgaaaagttctgaagaccattacatgaatctcatttacgtttctcaatcagccatctatttttcagggttagaagaaggattggctctgtgggaaaacaagtatatgcagagtgttccaaggcaaagaaaaatatgtgcaaagctgtaaaaacaaaacaatatatttcaaggtggtaaagcagagtctatcctgctgaggctagatgggaggcaaggaaacaattatccagatcagctcaaggcatcatatcatttggattcattttatgactaatgaaaacccataaaagagttttaagaaaaggaatggtataatttgatttctagttttgttggattgttttcctggatgctgtactttttgtaggcaagaggcgacaccatgagtccaggtagggtgagaaagtgtggggactgagagagagtgatgataggggaggtgcagagcagaaggctgatttggaaaacatttaggtgatgaaaagtacaggtgatgttactaaatgttgggtgtgaaaaagagtgagattaagggactcacatgtttgttttcaattgttttctcacaagtatgtaggtaaatggcaataaccattttgtaaaatggtactgactggatagaatgcattttgagagggctttgcaacttttgacttggacacattatgattgagtcgccaatggaaaatcaaaactggatatgtgaagtgtggagttggatatgcatctagagaggagatatgcatttcggaatatcatcatataaatgatgacgctaaattggataagaatacagaatgaaaagagcaaagagctcaagatgaagccctgaaacattaccacatttatatataagacagaagagcaatagatagtaaagaaaatggggaaaaaaggaggacccagagaaacaggagaaaaaatctagaatgttgccatagacataaaaataaggaaattattaatgaaaaggtagtgtaacagattgcttaataagtcatcctgtctgaattctaattccactgcttgctgggcatgtatctttggccaacacagcaagtctatttgaagctttgttgactctttcttgttggtaaaatgtcacatatttacaaacagttctaatatttcaaaggattgtgttagttagcagactaaaatatttataaatatttattgccatagtgccttatataataaagtcaaagaagttgtaatttaattaccttaatatcattatcaaagtgataaatatttctaatttagttattatattctgttcagaaattgtgatggattaggtaaggtacaggccaatgacaagtgtaacaaaaatggattttaatagagtagaagagacagaccctacatagaatctgccaataaaaataatgagctagacattcaatacagactgtagacataactctttcaagattctggctttgaatctaataggaagatcagaatattgcttgaggaaagttgtgcactgaagggataattaaaagaaaaaagatggaagacaccagagcagatacagcaaaaggggagctgcaaaggctgaacacatgacttacatagttgccctgagaaaatgcgaggggaaaggactcacagctactgtggaggtattgtgctttggtggcaacaggactgcttacaaccttgtgacaggtggcaacaggactgcttacaactttgtgacaggagatgggaaggaaaatgagcagtaacgttggaaaatggtagaagctgatggattctgttttgaagtatgagacatggtcatctgagattgaatagtgtgtgggcgaaggaggaggaagagtactaggtagaatagaaaagttttgaaatagtcacagctgagaaagagaatgagtacattgtagatgaaaggcagtgtcaaaggtccagttaaatttgactcattcctgctgttgtaaacacctatcataggacaggagaaaatggtgaaaacacaagcacaggtctacttatccagagattttattctaatataagacagtggaaaactaaaaagagataagccaaatatccaagtaataaaaatatttaaaatatattttatgtatcactgtgtacagagaaatagaaaatccaataattgagatagaaaataggagggaaggaactggagatctgttttacataggaagtcatcgatgcaaagaatggttgaaagccatttgttatagtgagaagggtatgtgcaacagctgaggcagcgaagaacttgacctttttaataaaattcaaagatcataaaatctgaatcctggatttagtggaggagagagacatttgataacattggaagagtaggcatggatcataaagaggttgagttttgctctaattgagagggggaggcttaatttaagagactcataaatttcttttctgtgatgataggtaaatttaggttttatgaagccagaagcttttacaattttgaggggtcttcttcaaaaaagaacacaaaattgtgaatatattgcttcagtagtctttccaatcaccagacatgaaatgaaaacctaaaggagagaaagttggagtggcggacatagcagtagaagctgatgtagaaaatgtctttctattgcaaattgtacaaagacttaggatcatttgaacacataactaggaatttgctagtatagtacaggcctccaaacattaaacgaagaaataccagcttagtattcttttcaaatattcttctctcagccatgtaacagaaaactgcatgtggattgacagacatctgagtatatttcaagtgtcctaggaggtctcttctttgtggaaaggtttccacagaattgttattatggagcacttaagctaaataaggagtatgtatctcagagttaaaaattcatattaacatttcacatatctagtactaggacttagggttttgagttttagatgaagaaaaatatttctaattcatggagtgtccattcacattcttctctaaatcacgttttgtaagttattacctctatataaatacagcatttgaataatacccaataatcaagatcttaactttcctttttaagataatgcttttcacaatattacaacagacagaatttatataaaattagcacaaaatacgtgaacaaacacacatacaaaaaaaagaattgctatgtagaagattggtatagacttttaggagagaaatcccagtgattctcattcaagtgtgattttctcaaataatctgcaaaactcattaaaacaaacacaaaagcaaatttttgtagttattattttgtgacattacttttaagaatagttttaaatctaattttgtaattgtattttaataattgaggttatgatgtaattaattttctttttagtatgattctaatttatgaattctagcttgtacttttctaagttagcaagaaaggaggattctgaataagaaaaataatattttggataatatttagtaatgttgctgatttttaaaaattataaacatgtaagagataattttacacatttcttatctgaatcagaataattatcaaatttattaaacattgatataaatagtacatataacaaaaattgttatatgttaacataaatattcaggatacctagaatttgcctttccatgtgaacttgaaaatttatcttggtttgttttctttatttgtaatatattaattatgtgttttttatattttttttaacttaaaatatattagaaatgctattttgggttctttttccttgattacattaaacaaaaataccaattttaattaatttcttagtgcatatatcttcactaataaatctttgatgagaatttacctttttgtgatgtatatgtcagtcatcaagaattataaacatgatgagaccagaaatcatttgaggttgtttagtttcagttaaataaagttatcattgactctgcaatgacagatattataccatcattattctcgggatcctccccagttctattataaatttaacttcttaagatatttccatggtgttttatgatgtgttcttttatttttaaaattttaatttctatgttttatatgtttagatggtccaaatgcagttttgttgcatggatatattgcatagtggtgaagtctgtacttttagtgtattcatcacccaaatactgaacattgcacccattaggtaatttcttattcctcaccctcctgctatcctgccacatttctgagtctccaatgtctgttactcagcactctctgtccatatgtacgcattatttagctctcacttataagtgacaatatgtgggattttactttctgaatctgaattattttacctaaaataatggcctttagttttatacatgttgcttctgaaggcatgattttattctttttttttctttttattttttgttttggctgagtagtattctatggcatatatctataccacatattctttatccaatcatctgttggtggacaattagtttgattccatattattgctactgtgagtagtgaggctataaacatatgagtctgggtatcattttgatatgataattgatttcctttgggtagatacacagtagtgggattgctgggtgaaatggtagttctgtttttagttctttgggaaatgtccattctgttttccatagaggttgtactaatttacattcccaccaacagcgtataagcattcttctttctcctcactgtcaccaacatttattattttttgactatttgacagtggccactgtgtctaatgtaagatgataactcatttttttaattcgcatttctctgatgattactgatattgagtttttatttcatatttcttggtcattttcatgtcttcttttgcaaaatatctcttcatatcctttgtccactttttcatgggattattatttttttttcttgttgtgttgtttcagttctttgcagattctggatattagccctttttcagattcatagtttgcaaatattttcttccattctgaggttgtctgtttactctgtttattatttcctttgctgtgaagaaaatttttagtttaattcacaatcacccagaagcaggtcatttaattttcatgtatatggatagttttgaaaattctttatgatattgatttatagttatatttcaccaagttctgataagatacttgatattatttctaacctttaaaattttgggaacttgctttgtagctgtagcctagcatatggtctattttggagaatgttccatgcacaggtgagaaaaacatatattctgaggttgttgggtggaatgtcgttaaaatgtctgttaggtccatttgttctacagtccaatttaagtatgaggtttctttgtttatttttttgtccctgcaatctgtctagtatagtcattgggggtgtggaggttgcttgccctcattatattgctgtttatctttctacttagctctagtagcatttcatttatgaatctgagtgctgaggttttgagtgcatatatatttagaattgttatatcttcttgcttcctttatcattgtgtaatgaacttcttgtcttttttttcttgttgatttgaaatctttttttatatataaatataactataccaaatgctttttgtttctgttgttcaaaatatctgtctccatacctttaccatgagtttgtataggtttctctaagttaggtgggtttcttttgagcagcatgtggttggtttctgttttccatatttggtccacaaatctatatcttttaagtggaacatttaatctatttatgttaaaagttaatattgtcatgtgaggttttgttcttgtcattatgttagttgttacctagctggtttgtagtcccaactgtgtaattttttaataagacctgtgagttttgtacttttgcatgtctttatgatagtgagtattgaccatctatttccatgttcaggactccctggatcatttcttgtggggtgaattcctaaagtggatttctagtggtgatgaacttccttagtattagcttgtttgggaaagactttatatattcttcatttatgaagtttagtttagcaaaatacaaaatatatctctaatatatgttttttcaataaatatgaactaatctttctttaagaaccctgaaaataggacaccaatatcttctggcttgtacagtttctgctgagaagtccactgttagtcttacgagatttccgttatagttgattagatgcttttctcttgctgattttataatttttcccgttcacattgactttagatagcctgatgactatatgtttgtagaagttcatctcgcaatgcatcttcctggtgttatctgagcctcttgtataaggatttctatgtctctagcaagagggcaagaggagataaattttcctcaaaaaggtttttttagctttttcttctccctcaagaatatctataactcttaagttttctcattttttagaacgtcatttttctcaaaacctttgctcattaaaaaatgttatttgctctttatttttgtctgacagggttaattggaaagacctgtcttcaagctctgagagcaagtttttctgcttgatgtaatctgtaattaaatctttcaactatattttgtaattcttcaatgaatttttaatttccataagttctatttgttttttaaaaaatatttttagtacatttttcattcatatcctgagttttttttctaatttctttgtgttgcttttcaactttctcttggactccatttagctactttaaaataaatattttaaattctttggtatttcaaagattttattttggttaggacttattgctgaagagttagtgtgatcctttgcgagtgttgtaatacgctgttttaaatcatacttccagaaatgtttcagtggtttcttctcatccagatgaactatcccttcttatttttaagtccagtttccaacagacaggattttttttttccctttgagaatatgactacgatgtatgttgtatagggctatttggtttaggttctgggttctttcagtggtaaagactctgtttgagtaccttggttagagataacttttgtatgatggctttcttaattgctggttgtagtagttatgtactgggtgtatgacgaggcttactgcctcctgaagggctggtatggaggactacgcagaaaactaaccttgttctgcatcatgccctagtgtcagcattttgcactgggctgtgcagttcaacattcaggacagtaggtggcacggacaggtaagagccagctgcagcagaggcagatgagcctatgcttgtcactgtttatgggagactctctgttgccccaaggaatggactgatctgtgaaaggtacagtggtctgaggagctggggacaaagcgggatagatctgtaccactaagctcacccttggatgctccaaggatgagcacaagcaccagccctgacaggggtgtcaggggaagaccctggggagatacccgtagcttgtctttcttgcaagcctggcttcattgggcacatgaccagtggagttgtagccaccccctaatacccctacaatgtccgtcctctggtgtgtctacaccagtctcctttgcgagtgaccacagctatgaacacagaattggatccacgggacatgttcccctctctacatccgtgcccaagcgctgggaccattgggctcctgggatggatctatactcctcccttgcagagccaaacaccgcgtctgcgtgtctgctggaagtggcgtagtcattttcagcccacaagcaggttgctcttgcacacaggaaagtgaatgctacagtcttctttgccacaaggggtgttcctttgttgcactttccattaggaatagcctccctggtggttaaactattgggaatgctgtaactcctttgggtccagccagctatgggtgactgccacatccaagcaggtgacagggaatatttgtgcggctctggtgttatggggacagagggctgaggttcctgggtaggaaacagtccccacatgagtgcactgcaggcatgaaacctaccactgcagctcaggcccaaggggaaggcagatgaccctattcaactagtagtttggtgtaatgccctcaagaagttcccaaatctccactcacaccagtgtgtgtgttcacgaagacagaagagctctctgatggcttggatccacacggtgagctgcagggagcccagaagactcctacctacactttctatgaggtcccacagggtcctagtcaacctttgtcaggctcttgcttctgtctttttccatgctttggcttctctccatggtttctctatgacgctcctgcaccctctcttaaatatttttcaagttatgatcatttacctgtaactttggttcttctttctgaggagaacttgtgtccaaactccttagtcagtcatcttgttttcaaaaagccccaattctggtctatatgcacttttcttttttaatatgagagagtaatttcatgttttgagtaaaaaaagtaatattaaatttcattaatgtcagtgattaaaactagattcattgtaaataagttgaatttacaaattaatttttagaacagatatatttcaataccataacatttataataaagttccatttcaatttagacagcatataaaacataatatgtagcattctttacagggaaaaggatttatctgatgcccctctgtatgacccaatatcaacctcactttattgtggcatatgtaaaattaactttggcaatgattaattatatattctcatgaaattattttacctttttcaagaaagagaatgcgaacttcctaaaatagatgtacacttagttcctgatcgcaagaaagaccagtataaagttggagaggtgttgaaattctcctgcaaaccaggatttacaatagttggacctaattccgttcagtgctaccactttggattgtctcctgacctcccaatatgtaaaggtgaatgcttatcttacaattgctgaaataagaattagaactttgaataccaacttttttcttattaattttgtttgggctcccattgcctgtaatctaatgaattaagtcaaatatttgcctgtgaaggacatgtattgagtactgaatacctgagattcagtcacttaagttaatctccactgtttcttgaacgatgtgctggaagtattcccagacacacaggtgttgtcggtcttagtctactttaggtttatgtttctataaaggaataactgagtctggatgatttgtaaaaatgttttatttggctcactatactcatgactataaaattcaagatcgggcatctgcattcagtgagagccacagaatgctggtagaaagggaagaggagccactgtgtccagagaacacatgatgagagaggaagcaagagagagagcagggcagtgacaggctctttttaagaaccagctcttccaggagctaatagagtgagaactcaccctgagagggggcattcatctgttcatgagagatccatacccatgatccaaacatctcccattagaccccacctgaaacactggggatgaagtttcaacatggggttggaggtgacaaacatttaaaccatactagtggctgacaatggagggatttctttgttaattttcattttgcttgaaatgtcaacatccattctggacattttatatagtgtgggctgcaacttaagtttcaccgggtgtgtctaaacaatatttaagcagcttatattcaattcagttgcttgtattgattagtcaaactttatgttgatcaaatgcttgcctcagttatgatatttttccaaaatgttatgataaaatgtttccatgaaatgtaaaaattaacatgattttcataaccacatttgctaattggttttcttgcatctttaagatatctagaagtctgagcatattttaacattttaatataccttcaatatgacaatttagtataagtaatacaatatgaacaccattcttgattgtttaggatgctataataagttacataatgaagaatacatgaataaaagaagaaaatctttccattttactgaatttttatattgtaaaacagacaatttaaccattatttacatagtatttctactatagagcaagtacaatcatgtggtccacctcctgaactcctcaatgggaatgttaaggaaaaaacgaaagaagaatatggacacagtgaagtggtggaatattattgcaatcctagatttctaatgaagggacctaataaaattcaatgtgttgatggagagtggacaactttaccagtgtgtattggtaatgtataaaatattaatatttaaacttgtcaaaacttttgtattttgtatctaaaacacatacatcatgttttcacaataaactttttttgtaaaatttacatagtggaggagagtacctgtggagatatacctgaacttgaacatggctgggcccagctttcttcccctccttattactatggagattcagtggaattcaattgctcagaatcatttacaatgattggacacagatcaattacgtgtattcatggagtatggacccaacttccccagtgtgtgggtgagaatacccttcttaaatcaacatttaacaaagtttaatatttttattgtaacaacaataattgcaactatatttttgaaatttacagatatgcctcaacatttccagtcttcaatatgagaccaatcttttgcatattgcttataattcaatatgtgtctagaaagaaaaaataaagctagtaatataattttatgaatctttctgcgtctgataacagtattgtttatatttaaaagtgtgaagcaacattttacttacaaaaattgtcatgtgaggccagggtggttgctcacgcctataacctcaacacttcaggaggccaaggcaagaagattgcttgaggccaggaggtagacactagtgtgggcaatatagcaaaagcccatctctataaaaaaaattttgtaattagttaaggtgtggtggtgcatgcctgtaatccagctacttgggaggctgaggaggaatgattgcttaaggccaggaattcgagattgcagtgagctctattgtgcattccagcctgggcaacagagtaagactctttctttaaaaaacaaaaatattaaaaaattatcatatgattaaatatgagtactaattactgagaaattataacagttttatataaaatataaatattattgttattgtatggtattcctttttaggcactgagaagcaaagaaacaaagttgacaaaatacctacttactactctcccataggattcttttctctcttaaagcttccaaaagtgataatttttcagtttgttccatatcagccaaaataagtgaatgtgctgcagggttggtgggccacaggccctctacatcagtggtatagctgagtggcatgaggtagtcagggactgagtcaggacgtaaatctcattgacggacttcacactgtaaatctcatgtcttgatcagcaagaaggcaaggtgattcacttacagtgtgacttgagatgtacaatctttaaaatcattttgcctctttgatgactaaccgggaggatcttggggaccctcattcacttttctctaaactgagatttttcctaaagttttcctgggtcctgaattctaagagtcctaatgtccaatcatacttatttatccaatgaaatatccaatgatattttgtatttcccaaagaataaaatgtcttctgataggtatctctaacatttcagcgacagaatacagggcttatattttgacataatagcattttgatgcaatgtgatcaggaataacttggttggtgaaatttataatgattaagtcataattttaccatgctaatactatttactttataactatttttatgtaatagttggtttgattcctatcatttgaattttcataaaaatatatttattttatagcaatagataaacttaagaagtgcaaatcatcaaatttaattatacttgaggaacatttaaaaaacaagaaggaattcgatcataattctaacataaggtacagatgtagaggaaaagaaggatggatacacacagtctgcataaatggaagatgggatccagaagtgaactgctcaagtaagctcttattttgttttcagaaatgtattctatttctcatttggaaaagtaataggtatgtgtgtcttttaaaaactttagctatttattattacaaatgctactgaataaggcaggtaaactagaaactaatgaaaacactgttcctaatattaactgtgccctgtgaattagttacctttagtataaacacacacacacacacacgcacacacacacacacacacacacacataaaccaggcactacatgtcatcattactgttggaggaccagtgcttctcattccttttcttgtcaacaaatgttcctgtgcctatacctctgtctatgccaataactactatgtatctgtttgtatatgtctgtatgcatgtatgtatgtatctatatctatttctgttgattcatttatttaatctatctctctgtctattcatctacctgttcatctacctaatcatctatttatctattaatttattgttcatctatcttgaaaagttagtcatattgacacatacagtttcacttgaatagtgtaggttttattccagtcttctcatattttatatctgtattttgctatccaattgtgggtttccttgcctcactaacttcaatatttttaccaatgtctgccagtctaggatatacagaaagcattgacaaccaatacaaaaactaatctgctatcaacatttcaatatgtttagagtccttaaagaagcaaataatatatatatgcagtgaagtgtacatgttctacagttttttcttgaagttttatagttttagccattctatatagatttattaaaatgatcgtatagttatcgtcctttctgttaatgggatgcatcacctttactaatttgcctatgttaaacgacctttacatttcttggattaaacccatttgatcatagtgaatgatctttttaatgtgctgtaggatttgttttcctagtatagtgttgaggggttttgtacctatgttcatcaggggattttgcctgtagttttctttttgcgttgtgtccttgtctggttttggttccagagtaatgttgggccactagaatgagttagaaaaatgatctcctcatcaaatttttggagtcgttttagaagaattggtattagtcctttctaaaatgttgttataattcagcaatgaagccatcaggtcttggattttctttgatgggaaacattttattactgacttaatctgttgcctcatgattactctgttcagattttctatttcctctgaattaatcgtcgtaggctgtgtgtctagaaatttatccatttcttctaggttatccaatttgttggcatataattgctaataacggtctctcattatactttgtatttttttgatatcagttgtaatatcacccttttcatctccgatcttgtgtttctttaagccgtatctctcttttttagttattctggttaaagctttgtcaatttttgattatctaaaaaaaaactattttcattgatattttgtactgctttgggggctctattttacttacttttactctgatctttatgatttccatccttctactaattttggaattgactagtttgttcatgtttttctgcttctttgaggtgtactactagactgtttatttgagttctttccactttcttgatataggcaattattcctaaaaacatccatcttagaactacttttgctgcatcccataagttttgctacgttttgtttccattctcctttactgaaaatatttttaaatttatttaaaatggtttgaccctatgattgtttcagagcatattgtctaattttcacctaatttaaaattttccatagttcctcctattattgatttctcatttcatacctttgttgtcagaaaagtgacttgatatgatttcagtcttcttgaatttgataagacttgttttgtggcctaacatataacatattctggggaatattctgtgcgcatttgagaagaatatgtgtttttttgttatgtggaatgttctttatatgtctgtccaatctatttggtataaattattgtttaagtttaatgtttccttattgatattctgtctggatgatctgtctcaacgttgaaagtaaaatattgatatcccctactattactgtgttgcagtccacatctccattcagattcctaaatgtttcctttatatatttagttgctttgatgttgggtgcatatataggtttataatagttgtattatcttgacaaattgaccccactatcattatataataactttctttgtacctttatacaatttttcccttgtctattttgtctgaaatgagtataactacccctgttctcttttagtttttatttttataggtttttttccatgccttcactgcaatctgtgaatttacgttacagtgaagtaagtcaattgtaagcagtttataattggatattaatttttgatttatttagtcattctatgccttttgattatagaatatattccatttccatttaaagtaattttagataggtaaggatttatagtggtaatttgttaattgtgttctggttgtttttaaaattctttgtttctttcttgcttgctttattcatggtttgatgactttctgtagccatatgcttaggattttttcttttaatcttttgtgtatctattagatgttttgcttttggctatccttaggcttgcatagcataccttataaaaggctatttgaagttgtagttatccttaggcttgcataacatatcttataacaggtattttaagctgataggaactgaattttgattacatataaaatatctaaattttactctgctcctcccatgttttctatttgatcacatgctttgcatctttcaataattcgtatctcttaacaaagtttgtagcttcagctgttcttaccacttttgccttttaacctttatgctagctgtatttacccatcactattacagtattagagtgtttgaatttcatattgtgcttacttttactagtaagttttatactttaacatcttcatgttactaattagcatcctcttctttcaccttcaagaactccctttaacatttcttgtaaggcaggaaagtgtccttatgctctctcagctttttttcaatctcagaaagcctttatcactcctttgtttttaagacagaatagtggaatctagaattattccttggcagttgttttctttcagaattttgagtatatcattccacttccttatggcctgcaaggtttctgttgagtaatccactgatagtcttgtggaaattccattttatgtaaccattcacttttcattggcttttttcaatacttggtctataacttttgataatttgattgtgttatgtcttaaagtgactatctttcattaaacttatttgatttcctttgagatttctgggtgtgggtttctatttctttcccagttgttgaaagttttctgtcattatttttttgaatatattttctgtatcgttgtgtttctttctgtttttaacatggtgataatgcatacgttattccacatggtagtattccatctggatcttaagctatcttcacttttatttatttatgtgtttattttggttctcagatttggtgattttcagtaatttgacttcaagttcactaattccttcttctccttcatctagtctgctgatgaatacctctttaaaacttttccgttcagttatagtattctcaaatttgtgatttttgtttggtattttaaaaatactttctacctctttgttgaagtagttaatttgtttttgcattgctctcttggtctcagtgagtatctttatgaccattattttgaattctttcttgagtaaaacacctatatccacttccctcaggtcaatttctggagactcatcttgttcttttgtttggagttatgatatcttgtttctttattttctttaactcacagtgtttctatgcaatagataagacaatggcctttctcagtcttatcagactggcttcatataggagaaagacctcactaatttttccagccagagattttcatgtgcctctcaagtctttgtgcggactgctgtctcttattttttgtggccccctggaggttagaatgtgccacatcttttcaggacctgggaccaacaagttaggagccaggaggtctagatgtagctgaaaatattgaagacttggctgtgtatttacttacttctattttcatagtgaaagtgaatgtgcgtgtttatctcccactctctctctgtattacaccaagtaaagaatctgtggctaatacctgtactaatattcaggctgcatgctctgatcctgaagaggtatctgcttgaaatgagtccattgtattaccagctttttgtattctgtgatgtagggcctttcaggaatgcagatctctatcatctcccagtgtgagtttgttaaggagacgatctcttgagttggagctatagaagtgatgacctttgaatgcatggctaaacttggtccaggaagaatggataaatctgaatttatcattggggcgagactcatgaagtgccaaactttggctttggctgcgggaagattattttttgtttgcgtcattagataccctgtgcaagctcgatagaggccagttcattaagtagccagtggaagtatgtgccctaagccctttcgacagagaaatggaaattgaactttctctttccttttctgcactgctccaatttggcatagcgcctggagtttttacatagcattttaagaccatctatttgctttacgatctatggagactggtatttttctaatatctgctgtgacagttaagagttttaagaggagtccttttggaggtaactgtaaaggttgtagcacttgatggatgacacaaacctttttgaggataaacaggggagctgcattttaaaaaccttttctctgcactgctcttgggcaatgaagctcctggaagtgcttacacacccatataaaacgccatttcttttttcagtggtctagatagactctggatatattttgtgccctctactcccagaactaagagctttagaatacagtccctgaatgaaagttgtaaaagttagggcactcaagtttgtgtggacaaacttgttctaagagtgattaatgtacctggatgtatcactggggtgagccacgggaaccggctagagaagtgcctgatgcaagttcattagaatccagactgcaagttttttagaattcagacctctaagtagccacaggaagaatatatcataaaacttctcgggagaaacaggggactgttttttcagccccttctctgaactgctattaaggaatgaagtttctggaagctcttcagcacttgtatcataccaccatttttcctgtgatctagagagactctcatgtgtttaatctcctctgcttccaaaattagtgaattaaaggccaaaacacaggatgctttatgtgagatccaaaaacttctccacaaggagaaactgggtttttgagattccttttctaattgtgtggtgcagtgaacaaggctggggtccatgctccattgtgttgcaacttttcttacttgttcaatgtgaatgttgtctttgttgcctgttaagtaggagtccctttactggtctttcattttctttcaggaggagttcatttatgaatagatgtttttttaggacattcttgggtggaagaagagtcaggagcttccacttctgccattttgctgacatcactccctgcctagctctttattttacccccaggaaactagagtattgcaggtatcgttaagtgctcctacacaagcaagagagaaacctgtactttaggatgctcccccaaaagctaggatgatagatgcttagttcactcttatctttcctctctgagggagaagcagtcaaaatatattggtctctgtttactttagggggttgcaggaggctttgaactggtttcttgatttctcataaagggaattgtttccagtatcgtcattgaatcagtgtgcctgtggggggaagggagagtggtggcttcctatactggcatcgtgctgatgtcactgccctctttcatcctcaatattgatcattttttaaatcttgatcattgtttttactttgtcctcaattttattaatattttcaaaaaccaattgtaatgcctttaaattttctccatttgctctgtattttttagttttattatgttttactgattttagctttgctaattttctcccttctctgtgtttctttgtccgttttctcttcttcactgattttactgttttcttccttctgatgacttcagttttaatttcacttttctcaatcttagggtgaaaaatgaaaacatggtcataaactatcatactttgaaaatataaaactttaaagctctattcttttaagcactgctttagctgtgtcccagaatgttacacacgtgtgtgtgtgtatgttctatgtgtcgggagacagagagagagagttcatttttatttgatttgaaatattttctcatttgtcttgtggtttgtctgttgatgattaattatatggaagtttattgtttaatttcaaaatatttgtttttttctagataagtgatttttgctggtttctaatttaattctcttgtgaaagaatactgggaaaatttcaatattttgaaacactcagttttttaattgctcagcacatagtctaccttgctaacggttctatttacaaataaaaatatgcatacacactaaatgtagaattaggctatactgggtcacaatgttcttcaaatttatttgccatgtcacaaaatgttaaataatctctttcttaattgtttactatcagcaaatactttaaattaaataataatgattgtggtacacattaaaatcaatgggatacagctgaaacagagatgtatttagcattataacatgcatcagaaaaaacaaataaaaaaataaaagcaacaggtactacaatctagaaggtagacaggaatgtacacccaacaaaaatagaaggaaagaatcattcaagcataaatagttgaccattaatcttaagaaaaataaattgatgagaatgttaaaaacatgtcaaaatattgaaaaacagaaataagcaaaatacttttgataaatatgaaatactttatcataagcgaaaaaagaaaactcgacattatcaataacctttaatgaagttttgttcatccaaacgtctccctgaattgataacaaaatgtcagacacttaaaatcattgccatgatttcctatagtacgattacataaagctttaggtgaagtagagcatacactatgataggagaaaggaaaatcaagggattatagaatgctcccagatgcttctaaactcccccgtcagtcaaacaggacatgcttcattttcatattatgaaaaaatgagatatttctgatgtatcgcagtttaacaggagcttagctgtgagtttacaaaggtgtctttatatgtgattatacaactaaagccaggctgtgcaatgcattaaactgggtgcataacatccatttaaatatccctaaacagtacaggtaagctagtaaataaaagctctaggggagtttcaagttttaaatagcacactataaatcactagtgattatatttaatgcttatattggtcaagtgtcagtaccaaattgattattaactacatataattctacttctggctaatcagattccattggcagaaaatttgtgagtgttttaatccaatcctgatacatttgattatagatatcaatttttatttaatgcatgtaattaagagtgtgtaattccattaaaacattctaaaggctcaaaataattaaaatcaatattacataaattatgcaaatttattaaacaaagaatatatgaaaaaactacaagaaagtctatgagaatacaagccaaaagttctattgtttaatgtaactgttacacagctgaaaagtataatatttgcatacaaaaacatcataattaatatgtgataatttatgaaacagttattgatctttctatttattctattttaatcatataaattatttttcatcaaaaattctaattttaatatttttattttttattttttattataacattaattatatttttaatattttttagtggcacaaatacaattatgcccacctccacctcagattcccaattctcacaatatgacaaccacactgaattatcgggatggagaaaaagtatctgttctttgccaagaaaattatctaattcaggaaggagaagaaattacatgcaaagatggaagatggcagtcaataccactctgtgttggtcagtagtgtataatttgttttacataattctttcaaatgaggttaatattctcttgtgcttcgtgtaaacaagagagaagttctttctctgtgtctattactttatcctgacaaaataaattaggacctaggcacattaatcaatcaccactctttcagttttttgaacaaaatacagccaaaatctttggaatattatgtaaatgtcagataacatttccattcatgcatattttaatccttgtgatgaacaagacatgaatgaagatgattattgaacaagaggatggtaacatagatatggtggaggaatatatctttgcgagtttctaatatgtttttgtttttaaataattttatttgttcaaattatactcactttaaaatccgaaatagtatttagttttatatttcaatttaagtattttatttgtttttaaccctttgattttcattcttcatttagaaaaaattccatgttcacaaccacctcagatagaacacggaaccattaattcatccaggtcttcacaagaaagttatgcacatgggactaaattgagttatacttgtgagggtggtttcaggatatctgaagaaaatgaaacaacatgctacatgggaaaatggagttctccacctcagtgtgaaggttaggccaatatgaatactcaatttctgtttatagtagaattcataaaaataatctcttgttatcaaagtgaggggaataattgagattactgcatatataaaataatttatatattataccattaaaatactttttgcatgattgaatctattctatttatgttaattttatttgttcatgatagagtcactttgtattctggcattaaaaaataatatctagtgaaattaaacctatctgtattattctcatgctgccataaagaactgcccaatactggataatttatacatacaaaaaaaggtttaattggctcactgttctgcatggctgaggaggtcttaggaaacttacaatcatggtggagggagaagcaaacgcatgaagacaggaaggagaagttctgaccaaagggaaaaggcccttataaaaccattagatctcatgaaaacacactcactatcctgagaacagaagcatggggataactgcccccattattcaactacttcctactgagtccctcccacaaaacatggagattatgggaagtacaattcaaattgttatttggttggagatacagtcaaatcctatcattccaccatggcctatcccaagtctatgtcctcacaattcaaaacacaatcatgccttcccaacagtcctccaaatcttaacttattccagcattaactcaaaagttcatatccaaagtctcatctgagacaaggcaagtcctctctgcttatgagcctgtaaaatcaaaagcaagttggttatttcctagacacaatgggggtacagggattgggtaaatgcttccattccaaaagggaggaaatggctgaaacaaagtggctatatgcttgatggaagtctgaaatttaatagggcagtcattaaaccttaaatttccaagattatctcctttgactccatgtctcacattcaggtcatgctgatgcaagagatgggctcccacagccttgtgcagatgtggctttgtccccctcctggttgctttcatgggctggcattgagtgtctgtggcttttccaggaacatagtgcaagctattgatggatctaccattctggggcttcaatgattgtggtcctgttctcacagctccacaaggcagtgcctcagtggggactctatgtgagggctctgaccccacatttcctttcctcaatggcctagcagaggttctccatgtgggctcccccctgcagcaaacttctgcctggacatccaggtattttcatatatcctctgcaacctagttgtaggttcccaaacctcaattcttgacttgtgtgcacccacaggcccaagactacatgtaatccaccaaggcttggggtttcaccctttgaggcaatggaccaagctgtttgttggccccttttagccacagctggagctgaagcagctgggatacagtcctgaggctgcatagagcagcagggacctgatccaggtccatcaaaccatttttccctcctgggcttctgggcctgtgatgggtgggggtgtcatgaaggcctctgacatgccccggagatatattccccattgtcttggtgattaactttggctccttattatttttgcaaatttctgcagcaggcttgaatttctccccagaaaaatgaagttttattttctattgcatttacaagctgcacattttccaaacttttatgctctgcttcctcttgagctctttgccacttagaagtttattctgccagataccctaaatcatctctctcaagttcaaagttccacagatctctaaggcagggcaatatgccaccagtctctttgcatagcaggagtgacctttactccagtttcaaacaagttcctcacctcatcttcatctgtgaccaccccatcctggacttcattgtccatatcactgtgagtattttggtcaaagccattcaacaagcctctaggaagtgccaaactttcccacatcttgtcttctgagccgtccaactccctaggaagttccaaacattttaacattctcctgtcttcttctgacccctccaaatggttctaacccctgcctgttatccagttccaaagctgcttccacatttttggttatctttacagcagcaccctactctctgcagtaccaatttactgtattagtctgttatcatgctgctataaagaactacccaagactgcataatttataaaggaaagaggtgtaattgactcacaattccacatggctgggaggcctcaggaaacttacaaccctggtggaagggtaagcaaacatgtccttcttcacatgatgacaggaaggagaagtgcaaagcaaagacagaaaagctccttataaaaccatcagatctcaggagaactcacgcagtatcatgagaacagcagcagaggaaaaatcgccctcatgattcaattttctcccaccaggtcccatccacaacacgtgaggattatggcaattgcaattcacgatgagatttgggtggggacacagctaaacctgttctgcaagttgtcatgtttgctttgccactatgttttaaaacttcttttacattcttcccacaatgccccttcttatttcctacaatatattatgttttacctggaatcgttaactctcaatgtgtatcttattatcactagtaagtttacagaggcattgtttaccaggcatagatgatctctttctgaaatgtattgctatttttagtttcaagtccttcttcagttggtgacagtccgatagacagacagacaccagaaggctagttttaggaaacatttgtgttacttctctgtgatgtcatagtagctcctgtattgtttattttcaaataaaactacttaatattaaaacaggcatataaaattaaatttatgagttagtgaaacctgaattcattcttttttttttaggccttccttgtaaatctccacctgagatttctcatggtgttgtagctcacatgtcagacagttatcagtatggagaagaagttacgtacaaatgttttgaaggttttggaattgatgggcctgcaattgcaaaatgcttaggagaaaaatggtctcaccctccatcatgcataagtatggtgcattgaattttattatatgtatgataaatattcttcattcaaagtgtaagtggtaccaataagaaagtaaacagggactctagaaattcataaggttttcttgaatattctggactgctgtgggaaattatagctgtagtaattaaaacatttgacattataagccaaattagttcattttcacatcatcttgtgtgaactttaagcatcctctgatgtatattctcagacttctcatctctgttcttagggcacagctgcctctactcatcaatctccacattattcaatcttctgtcagtttatcaacaatctgcctataagtacattttctgaaatattttaaaaaatcattataagtatttcacatttgatagaagcaaaaaatttggaaatgcacacacaatataggtggtgtattattccgttttcacactgctgtaaagaccttcctgagactgggtaatttataaaagaaaaaattttaattgatcacagttcctcatgactgaggaggtgtcatgaaacttaccattaccgctgaaggggaagcaggcaccttcttcacaaggtggcaggagagagaggagtgagtgaaggaggaacttctaaacagttattaaatcatcatatcttgtgagaactcactcaccatcgtgagaacagcatgtgggaaactgccaccatgatccaatcacttcccaccaggtctctctctcaacacctggagattattattcaagatgagatttgggtgaggacacaaagcctaaccatatcaggtggcaagtatggacaaaaataatgtgaacaaaaaaatgtgtaatctcaattgctacggctaccaatatttcttcagtcttctaatatcatttctatcttgtatttttaatagatttagaagaatttaatgtaattaagacaaaatggctaatatattttctcaagttataagaaaaatgttgtacagtattcattgattctatatatcgctattttagaatccattacatgtattgtatgtaacctatttttaaagatttgcggaacaaatacatatttttcctatttcagaaacagattgtctcagtttacctagctttgaaaatgccatacccatgggagagaagaaggatgtgtataaggcgggtgagcaagtgacttacacttgtgcaacatattacaaaatggatggagccagtaatgtaacatgcattaatagcagatggacaggaaggccaacatgcagaggtactttggtgaattttcaaaatttatttatataatgtgtgggcccagcccagtggctggcgcctgtaatcccagcactttgggaggccgaggtgggcggatcacttgaggtcaggagttcgagaccagcctggccaacatggtgaaaacccgtctctactaaaaatacaaaaaaatagtggggcatggtgacatgcatctgaagtcccagctacttgggagactgaggcaggagaatcgcttgaaccagggagatgaagattgaagtgggccaagatcgtgccactgcactccacccagggtgacagagtgagattccgtctcaaaaaaataaataaacctgaaataaataaatatataagtacaatttatttatatagagtgttttgggaataaaatatagaattgtctctaacatcattaaaatggacataaattaagtttttacggcaggacaaagtagtcgtatgcctaaaaataaaaagatggaactgagtatttgatgattaatcttagctcaatagttctcaaagtgtggtcgctaaaccggtagcatcatcatcttcttggagattgtttgaaatgaaaataaaattccgtaagctcattctagacatccagaatcaaaagtctcaaagtaaaaccctgaaactgttttaccaacacctccagggaattctatttacacttccgagtgagaagcattgctatagtctattcactacacatggatatgaaactctctgatgaattttgcattgttcagcataatatccttaatcattggcaattaaattatctgaggttatttttattattataggctttttaaaaaaatttttccacatctccaatttggatcctttgattaaccattcttcctccttttaacttgggtaattttcaaaatgtgtttttaattctttgcttattcgctaagaaaatgcctatttgagtttatttttaagaggctaaaatgtataagcaggatgattgcaaacaaaaatctggtatcacataatctatttatgctgactttttgcattttataaattaatgttaaataaatagaactggtaatatttgtttactcaaactcaaagagagatatccaggaaaactttcgtttacactggcttccagaagggaaaaataaaggtctatcagtgttctagcgaaggatgaagaagaaatttaaaacatcaacgcttgtaccttacaaaaaatagtttcatgtcttttcctcaatattacatttaaatttattaaaatcaacaaaatatttgatgagattgtctacttattttaaattcgtcttgaaatatatttgtaactgttatcagttgatttgctactcaaaatgaacactaggtggaaccacttcttttttttctattcagacacctcctgtgtgaatccgcccacagtacaaaatgcttatatagtgtcgagacagatgagtaaatatccatctggtgagagagtacgttatcaatgtaggagcccttatgaaatgtttggggatgaagaagtgatgtgtttaaatggaaactggacggaaccacctcaatgcaaaggtagagtattatatttcttttaacattttgggggagtatagcagggttaaaatatgttgatttaaacaaaatgaagtcatttttattaatagatttttcaaatgcaaataaaatgactgatggtgcttaaaattcaattcttcctgtgaacagaacacaagtaatagggtatattattttccagaaagattcgaccaaattgagagttggaacctgaaaaacaatactttttaagcattacaacacttagttccttctcaggaatacgtgtaataaaagatacattatgtgcatttgacagccataagtgatgtgcattctaagatatggaataggcagttgaagagagatcatagactgtgatataaatgtgggcatcttcagtatatggattatatttaaaggtgtgtgactgactgtatttataaaaagaagtccgagcacatagtcctgggtcattctaatataaagagatgaaataagggaaaccaaaaaaggaaattgtatcttactcacctttatgttttaaaattaatgtttttctgtattttttttttcactattttacttagactctacctatgtttattattgaagtgagtttttgtagacagcatatagttgggtcatgtttacatatccattcatcctttcatggcctgttaactggtgcacttggaccatttacacttaaaataattattgatatataggacttaaatctctgtcgtttatttgtttctgcctgtttcctctgggtttcagtcctatttccctattcctccattccctgtagggaaattattaaggagattaatttcgattcatatgtattgttttccattctatctctttgtatagcttttctcctccttttaaaaagttgttgctctagctaatactatatatgtaataatatattactgtctactggcactgacatttaaatctacaactggaatatggaaaccttactttcatgtagatccatttacactctccacgttgtaagtataaatgccactagtattttctctgcatacattgagctccatattaaactcacttgcttcaaatatcgaacataattgaaaaaacttatgaggaaaaagatatcctgttatattgactcctctgtttatccattctatttttctattttttcaggatcctaaagtctcaagctctttcttttatctgttttattttaatttgaagaattcctttagttaatctttaggcataggtctactggagacaaattcccttggtatccctttctctgagaatgtctgtattgatccccttacttgtaaaagatcgtgtcactggatatcaaatttggagttgacagttctttgaacacttgaaaaccgtgccacatggttatagatgaaaaactcagcatcatttgaattgttgatcccctcgaggaaaagcatagtttttgtctagttgctttcaaggtatttttttctttttttaaagtagttttattttaatgtatattggtataaattccaatgtttttatcctctttggagttcactcagcttcttaaatataagtttataccttatggtcaaaatgggaagttttcaggcatcattttatttattcatttttccagcccaatatcctttctcttctttttctgcatcggcattatttgttgttgtatttttctgaatgtctcagttcagttttttgttttcagtttattttcagagtgggtaatttatattgctgtatgttcaagttcatggatttatttgtctgtcagctccccatgtattattaagtatattcagtgtttttaaaaaatttttgtcatacttttccattttataattcctatgggatttttcgaatatgaaataagaaacttcctttgtcatagttttctatgtttagcatgtattcattcggaaagacatttcttaatcctggtctaccataagcagcaatatttgttaatgttttatgtgttctttcagtacggagaaaagaacttaaatatattactttcagtttaaagggttaaaatttcttccaggactcatttctttcaccagaaatcacaaaactgttgatattatatacagtgctgtgtttgcgtttgccttatttgaacttgtattttgatttgctctcacaacaaatcaagtgatgaaatgatgttttttagattctacaggaaaatgtgggccccctccacctattgacaatggggacattacttcattcccgttgtcagtatatgctccagcttcatcagttgagtaccaatgccagaacttgtatcaacttgagggtaacaagcgaataacatgtagaaatggacaatggtcagaaccaccaaaatgcttacgtaagtactttaatattcacgtggctggaaaaatctctgtgatgagtctgatatttcactgtttgtaacaaaatactcacagattattgaacaaccattctgctgaatgcttgcctaccaaatatttctgtcagaaagtaaagtttagaaatttttctctttagggctgggtgcggtggctcacacctgtaatcccagcactttgggaggctgaggcgggcagatcacgaggtcaggagattgaggaccatcctggctaacacggtgaaaccccgtctctactaaaaatacaaaataataataataaccggcatggtgacgggcacctgtagtcccagctagtcgggagtctgaggcaggaaaatggcgggaacccgggaggcggaggttgcagtgagccgagttcgcgccactgcactccagcctgggtgacaaagcgagactccgtctcaataaaaacaacaaaaaaagtaatttttctctttatatttatattttattttaaagcatttagttgacaaataaaaatatattttgatgtttgacaatatgttgttttgatatatttatgctacaaagattaccacaaattaattagcacattcttcatcacctatgcttagcattgggtgtaggtgggtgtgtgagtatgtgtgtgtgtgtttgtggtgaggacacttaaaatctgctttcttaccaattttcaaataaacaatacaatattattagctctaaatatcactagatctctatgtttgattccaagttcttattcatattatagctgaaagtttgtactctttgaccaatatcttaatcaaaagcagcaatgataagttctaaaacgcagggatcctaaaatgacaactgatgtaatgaatcattgataatacacccctaattctcatacattaaacatcgaacctcattttcacatcgattaccattctaagtttattcaaatcaatatgatgtttctacatagttggtttggatagtgttttgagaaataattcctgaaccatcatataacattctacttgaaaacctgaaagtctatgaagatttgcatactacttaatgttttatgtttactgttttttattttcagatccgtgtgtaatatcccgagaaattatggaaaattataacatagcattaaggtggacagccaaacagaagctttattcgagaacaggtgaatcagttgaatttgtgtgtaaacggggatatcgtctttcatcacgttctcacacattgcgaacaacatgttgggatgggaaactggagtatccaacttgtgcaaaaagatagaatcaatcataaagtgcacacctttattcagaactttagtattaaatcagttctcaatttcattttttatgtattgttttactcctttttattcatacgtaaaattttggattaatttgtgaaaatgtaattataagctgagaccggtggctctcttcttaaaagcaccatattaaatcctggaaaactaa

SEQ ID NO: 168 - DNA, 7744 bp, Homo sapiens
ggatgtctgcagcagcatttaaattctgggagggcttggttgtcagcagcagcaggaggaggcagagcacagcatcgtcgggaccagactcgtctcaggccagttgcagccttctcagccaaacgccgaccaaggtacagcttcagtttgctactgggttgtgcattcagctgaatttcatggggaagtccaaattctaaggaaaaatatttttaattgtaatgctgttaaacagacttaaattttctagcctttttaataagcagattagatacattgcaggtctcctggaacaaaggtgtctagatattttgaatgccaatcaaatttaaaacttaaaaatacttccactgggtcctcaaaagaacggaaaccaccgatgctaatcagaaaatagtaaaattaaattcccctttggaataattatacctatataattttcagtgggtgactgtgcaggaatttaaaagaaaagggatcttttatgctaattaaaccaattacaatgctattttttaaatgatgtatctcacttttaaggggaagaaaaccctttctgaatatgccactgctaaatttagctgttaaaatattcaccaagatacctgtatgacactgtgtaggcttattattacaaatagaaaagctgttggctattttcaatgttttcctttgaatttcaaatttttagaacatcttacttaaataacaaatttcagagatagtttgatttcacctaagtagcacctacttgataattaagctaaaagtcacatttaaagtacatgttggaaaaatggataaagcaaatttttttcatttttttctgtgagttttttcttctctaaaaaatattcccatactagcttattaatataattaagttactgttgatctgtttgtaggtttagagagctagatatataaggtagtaatggtataatttctggaactctaaattttaaagttgaataaatacagacttgcaaaatttccctttcccttgcctaatagtgaaagatggataataggtggcaatataaatattaacttgaaagactataatactaaaaagaaaaggcatctctaagaagtagaaaagattctatagaaaatatattttatttgtgatcattttgtaatgtggtagtataaaaaggtatcactgttgtaacctatgaagatgtcagctattccttatgaaatattttgcaggaaaactcactaccatgagaattgcagtgatttgcttttgcctcctaggcatcacctgtgccataccagtgagtacagttgcatcttaaagaaaattcctgaaaataactgaattgtgtgcttccatgtgctaggaggacattcttgtaatctttcttcatcttttctgtttctaaggttaaacaggctgattctggaagttctgaggaaaagcaggtaagcatcttttatgtttttatatagttaaatcatttactcaattatggcgagaggtgcaagaaacgtatttgctgcgatattacttatcttctcagtcaaatccattggtttacaagtattgattgactgcctgctatgaatctaggccagtaccaagcacagtatagtttttaataaatataagtttataaaaccaacccagatattttaaatataataatatctaggcatgtatgatgagttatcgcatgtaagataagttatatgaagttgtgtgactttttttccattagtccacatactgatctaaaagcagaaaattccagcttttgctttgtttagtggattgctaagtttaaaattcacattggatattagtcagaactgtttgtatgaccataatattcacaatattgtctgagatattagctgagaagcccattgtgaaaagaaagtctatgtgtgctgtttgtatctattgtgattgtcagctgatgttagatcacattttctaaccaaacataagaccaaccaaactctttattataattatttgaccagcactaaagatgtacctacccctccacaacagatgaaactgtgccagccaaacaacaaatgggcattgtccccagaagcttggacaaaaaggcacacagagttcaattccagttgaacagaataaaggccaaaatagagctgccttgggggtcactgcaattagactgcttaatgaagacattaaaagaagtattctgtgttcgtttgtgtgtggaggggtgtgtgtgtctgtttttcaactgatttgaaaatacaggtgttgaatcctaataataaaccagaaaaattaacatctccagagaagatagaggtcatactatttgaggcaagaattagcgtctttttaataaacgaaaatatggcaaagatgcattttagaaggcacgtggagctataacaatttaagaaatacgtgaagagctcaaggctcagccttctagaatcccagaaacttaaagctagtaaaaaattggggaagtctctaaggatatatgcctgaaaatacacactggttatctgtgagtgttaggattactgggtggtttttagtctattcattttgcttacctttattttcttcatattagtttttaaaaattataaatgtaacttatacatccattctctctgagcctgtattacatgtgtcatgagaatagatagatagatatgaaaaagtgaagagaaaaactctgaactcatctggtctcactgtttttccgccttctttttttttttttttttttttttttgagacggagtctcgctccgtcgcccaggctggagtgcagtggtgtgatctcggctcactgcaagctccgcctcccaggttcaccccattctcctgagtagctgggactacaggcgcccgccaccacgcccggataattttttgtatttttagtagagacggggtttcaccgtgttagccaggatggtctccatctcctgacctcgtgatccaccctccttggcctcccaaagtgctgggattacaggcgtgagccactgcgcccggctgttttttcatcttcttaaagcaaggaaccccttctttcagcaaaacctttcggagaagcccaatactaagctcctctggttagagccagccatgagagaaactccaagtacttctgactggttctctctctactcatccaccccttaggtggctgcagaaggaactctgtgcaacccccagagttctcattctcagtgacagggaaatgtaatgattggccctggatgattcagcagatcagatgatacttactcagagcaatttccactcctttgcagtagcatattatcagtattttccagataaataacttggctaaagaaaaatccatttcatttacatctttggcaccttacagcaatagaacttttgtgcaatgattttaatattatatttctacattggctgataagatacatatggctattgagcactcaaaatgtgggctagtgcaactgaggaactgaatttttatcttctttttttttttttttttttttgagatggagtcttgctctgtcacccaggctggagtgcagtggcgcaatcttggctcactgcaagctctgcctcctgggttcacgccattctcttgcctcagcctccccagtagctgggggtacaggtgcctgccaccacgcccggctatttttttttatttttattttttttagtagaaacggggtttcactgtgttagccaggatgttctcgatctcctgacctcgtgatccgcctgcctcggcctcccaaagtgctgggattacaggggtgagccaccgtgcctagccatttcattttaattaacttaaatttaaatagctccatgtggttagaggatactgaattagcacagtcttagagagttccttcttgttccatggactggacacaatgaagattaacagtaattaaggtcacttctggtttagatgtgctttatctgagaggaaaattcagccagcaaacatacaaaaagaaagcacagtgtgaagttcggtgttaagagctagtttgcctgcgtttgaaccctgcctggctctgccatttcctaccacttaactgcactgtggctgagttttctgatctgtaaggtgggaataataatgatacctatctcataggggaatgaaaggatcaaatgagttcatatttgtaaagcaatttgaaagagtgcctagcccacagtaagtgctacataagagtttgttaaatgaatctgcaaaaaaaaaaaaattacaaaaaggtacctaagggtccgggtgactatatgcttccatcaagactagtgaagaatggttgttttttccattcatccctacatttctttttttaataatgataaacatgcaacttttttgtagctttacaacaaatacccagatgctgtggccacatggctaaaccctgacccatctcagaagcagaatctcctagccccacaggtatttttaaacttctcataattaaactacagtgatgaaagatagccacactcaggccatttgggctgctcagatgaatcctgcctgcctgctggcaaacatgtgcttaggacattgactgatctgccatgttggcttctctctgtgttaagccatccacagatgaggctgaaaaataaaaactgctttggattaaaaaggttaacttttgaataaaaaagctaggcatgtgtgatgcgcactaacacgtgccattccttcttcagaatgctgtgtcctctgaagaaaccaatgactttaaacaagaggtaagttctcattttcaatcagaggcccatcatgccttgaagagatgaaagaaggcattgcctggattctcttctgatgaaatttcattagcaagttttccagctaattggcagtctaaaacttgctcataaataaaacatgtatttactaaatatcagaaatactaggtttcctcggataagtttagcattacagaagatgtttattaatgcctgttatttgaaacattaatctgcttgcaatttatttaaggtattttgtagatatctaatatctaataagcatctaattaatgcatatcaaagctaagattttgcctttaggaaagttttctttcctaataaaatagtttatttgacaactattctttttattaggatcattcatatatttgctaagcaaagagtaaatttattttccttaagattcaatttgaatatactaagaatattaaagcaagttagataaattacccaatatatttgtcaatttgaaatttgatagacattagttgtttaattcaatgggcagttttgagctgcagtttatacacacatgcataacagagtcacctttcaattatccatgttaataggaaagtggttatagattttagtacacacattaaaatatggatactcttctcttttgataaatctcatttcaaataaaaaaaccagtctcataattatgtatctgtatctattacatcattgaatttagtaaataatgtttaatatgtataaggaaaaacaatgttattgacatgaagattatactcacatatttggcttgaaaatatctataaaaataatttctgttgcaaagtaagaaatgttcttcagaatgttattaatccctgtgttaaaagagaaattggaagatgctcactttagctcctaaaagccatggtatgtactgtgaatgcaaagattctgaaactaaataaaaagaaagatagtaaaagactaatgtgctataaaggctaagggaaaataaaaacccatatattaattttcccggccatcttaattttcagacccttccaagtaagtccaacgaaagccatgaccacatggatgatatggatgatgaagatgatgatgaccatgtggacagccaggactccattgactcgaacgactctgatgatgtagatgacactgatgattctcaccagtctgatgagtctcaccattctgatgaatctgatgaactggtcactgattttcccacggacctgccagcaaccgaagttttcactccagttgtccccacagtagacacatatgatggccgaggtgatagtgtggtttatggactgaggtcaaaatctaagaagtttcgcagacctgacatccaggtaaatcctttaacagacacacctgatggttctgactagcgctcaagtctaggaaaccacagtttgcatattcattcattcattcatccattcattcatccattcagcaagaattcattcatattctactttatgaccattgaatacaaatctttttctgcttggcggtttttgtaagtctacataatttctctctagatttgattctcaaacacaattctactttttgaaatcctggatcacttattttcagattaaaataaatggaaaacaccaattatttaaaaaaaataatggtcatgttttgaagttaaatacctaagaggaattgtagttgcaaattacactgaatccttagtcacagaatctggatttgacatagccttgccgtttactattctctttactttttaactaacaattcacttcctctttatgtaggtttcaatataatgaaacctacctcataggtttcattacatatgtaagtgatgtagttattaaactaaatgagatgacatatgtgaaaggccttggtaaagtactatacaaagtaacatgctagtattatttcagccagatttagacaatttttagtataagatgacctaaaagctagagagtggaaaaggattaccatattcccatccctagccgttcatataattattcttcatttgtgccgtgattcagtaccctgatgctacagacgaggacatcacctcacacatggaaagcgaggagttgaatggtgcatacaaggccatccccgttgcccaggacctgaacgcgccttctgattgggacagccgtgggaaggacagttatgaaacgagtcagctggatgaccagagtgctgaaacccacagccacaagcagtccagattatataagcggaaagccaatgatgagagcaatgagcattccgatgtgattgatagtcaggaactttccaaagtcagccgtgaattccacagccatgaatttcacagccatgaagatatgctggttgtagaccccaaaagtaaggaagaagataaacacctgaaatttcgtatttctcatgaattagatagtgcatcttctgaggtcaattaaaaggagaaaaaatacaatttctcactttgcatttagtcaaaagaaaaaatgctttatagcaaaatgaaagagaacatgaaatgcttctttctcagtttattggttgaatgtgtatctatttgagtctggaaataactaatgtgtttgataattagtttagtttgtggcttcatggaaactccctgtaaactaaaagcttcagggttatgtctatgttcattctatagaagaaatgcaaactatcactgtattttaatatttgttattctctcatgaatagaaatttatgtagaagcaaacaaaatacttttacccacttaaaaagagaatataacattttatgtcactataatcttttgttttttaagttagtgtatattttgttgtgattatctttttgtggtgtgaataaatcttttatcttgaatgtaataagaatttggtggtgtcaattgcttatttgttttcccacggttgtccagcaattaataaaacataaccttttttactgcct

SEQ ID NO: 169 - DNA, 121843 bp, Homo sapiens
agcggcggcgttggcgctcagtccgcggcgcgaggacggccggccggcagggggaggcgggggggcgccgggcagccccgccttttcccgcggaggcgccgagcggccatattgcggagctgtctgcggtggcggcggcgcctctcgtctcccgcgggccagcgctcgcaccaccgcttctccctccctgtcgcagccgcgccgccgcgcagcgccccagccacacgccggcgggcagaagccgcccgctctccgggtaaggcgcggcgccctcccttcccccactccccgctcccggttcctccggagacgctaaggtggcggcgcgaagttgcggggcccgtgctgcccggccgtggcgccgccgccagggcttggcgcgcctccgctcgcgcccagctggccgaggcgccactgtggtaacggcccggccggccaggctcctcccggggctggtaggggccgcgaggccctgcccgagtcgtggctgagccgcggcccgaacgtgcctggccgggccaaagtcgaccttcgccgccgcgggattctcctttcctcggggcgcggagtctgccttcagcgccggtgtcggacccccagcgccctggggacggtgggctcccgctgcctggactgggccccgggcccgggctggcatggtcccaagggttgtttgaaaatccagatattcagcgtaggtagaattcgattttacatttattagaacttgttccccggcctccagtttgaaaggaggggtgttaaattactagagagcgtgcgttccgccccagtggcaaaggggatgttgcatgacaggctttggggcgccagtcgctcccgccgctcgcacccgccaggccagggccgcggttcccggccgcagctctacctgctgctgttgcagctctcggagccctgtaactttctcgggcccttgaggccgctcagttttagtgtctcagaccccaccagacaagttcagtacatgatatccctcttttcctttaaaggattctaaactcaattcccggactaactttgaaagggggcagtgcatttttgtttttttttttttttcagtttaaacagactacatcacttcctagacagatgtcatgtttcttcagacattcccaatatttggtggtttttttttttccttaaagagtagttactaggttggaaatgtgttaaaagtcaacttcataaaaatatattttaaaatacatttgagattttggtggaagacacgttgctgaggaactcgatggcattcttgtggcactaagactggcaggatgtaaatataaaagtctaagataataagggtttatttgataaacgagtactttgacatagacattgtaatctattgtttaaggagcatacttctttttttttttttttttttagaacactaaatactcttttatatgactgatggagctaagaaggaacaattaccccgttcatgttgctggataaataatggcttgatccatttgccaaaacagcatcactggatttgagaaaggagactaatattcaggattgcagttttttattttcagaatttctttgctttccccagtgtgctttatcttccagagattaataatactttccttcaaatacagcaacatgtaaaacactccttttgaagttaatcgtatgctgtaaagacgattgcagtgactttctttgcttaatcgcttttttatatatgatggaatttaataaacagttggtatattattagcaaggaatgaatagacattggcattctttacagttttatttaaatgagacagaatttgattgtggcattgaaaaaacgttgagttcttgaccttaggaatcacatacaatgttttgttcactcctgtatccccacacatggaagagtatgtaggagagtctcagaagtagctgtagaatagatgtaattaatttgggtgtagggaaaatacgttgagtctgtccttttgtttttttttttgaaattgtgattaattaactgaaagtcaaattgattactttccttttgttggtaagaaatgacagactttgctgttgtttccctcccttgctgagtctcattagtctccgggatggggaacgcgttgtcttttgtttattggttcactgttcccaaaagcagaattggattttttttttaagtcgataaatttttactcaaggaattccatgttgtgatttcttccactgtccatcaaggtcactttagatcctctaaagagctagagtcaaaagatttatcttcaagttagtcctttttaatgaaaccgatgcttattttaatccagttagcccatctcgctctgtctcccagggtgatatgcagtggcatgatcttggctcactgcacctccgcctcctgggttcaagtgattcttgtacctcagccacccgagtagctgggactacaggcgtgcgccaccatgcccggctaatttttgcatttttagtagagacggggttttgccatgttggccaggctggtctggaactcctggacctccggcgttctgcccgcctcggcctcccaaagtgctgggattacaggcatgagccgctgcgcccggccagaattggattttattattcattttttatctttggcaggctgttgaagtgaaagtctttatatatttttattttgctttcagttctcaatcttttaacctactatgtgtgatctgatataatagtctgaaatggtaaatgatggtgagagtcttgttttttcatccatttttaatttaatgcattttaatttatgctactaatgtttaaaaacggggtcaaattttaaccaatatttcctgtaggccaaagtctaaaaaaatctgttttattaaggttgtgaaaactgagctatatgctgctggagtttatatgtaaggtgtagataaatataatttcgtgttacttctgtgcatcggggaagtcaagcaagtcactgttgggtggcaggaaccttcctgcagaccacgagctggcaggtggtacttaactgatactacccctggggtacaagattcagtggagctggattgggttgctatggactctacccttaaaagattattttaagtctcatggcattactgatccagctgaagactgttctggtaacttccttgattgctgcagccagggtgtgcgtactgctttgatgatagaggtgtccaatctggccccagagagttcctcaatttctagcctattttagagaaatcctgcctttcctactttaagttcctggtgtatatctttatattgaatgtatagcttaagccatttaaaaaaaactataaaagtgatatattttatggcaaagtttaaaaactcagaaaaatgtcaaggaaaaggtcaaagtcctccttactccctggaacaccccagcccctttcccagtcctgttttccataggtagctgctgtcggcaattccttgtttatagaaaatgccagtaggtatgcagggataaacatatactttatatcccttatttgtgattttaaagtcttgttaaaatagggttatattgtaacagacattgaaaggatgcttattaacttgtgttaaacattgagtaaatcatatttctcatgttttcatcatttgaataaaagcacacaatagaattccctacgctaattctcaagtgtgtgtatgtgcaaatttgtttgtgtacagattttcttgattaatgattgaagatgaagtttactttttgttttctagcatatggcatatagttgacaatgagaaatggtgtcttttaaaaaaggaggtttataatttggtgtgggaaatagccacatcttgctctttacaaaaaaagtttgccaactccttagaaaaaacatcctgttgaaaggatattttagatacagtattgaagaaacaggtacttcattgtttattttctctaagattatagaatttataaagctattagtaattgagataatggactgttttcttctgagttgtagataatctctatggctttcaggaccttaaatgttttttttttttaatttatttgtgaaaagtttaagtcaactaggactgactgcaggtaaatttgtgaagtgagcgctcttcagttttgagcccttagatcctttaagatgcattggcatcaaatagcagaaaattctccaactggtttaaacaatgaggaaatttaatgtcatttttttcttcatttttttttgaaaacagagtcttcctctgtcacccaagctggagtgcagtggcactattacagctcactgcagccttgacctcctgggctcaagtgatcctttaagttcctcccacatcagtctccctagtagctgccaacacaggcgtgtgccaccatgcctagctaattttttttttttttttccaagacagggtctcgctctgttgcccaggctggaatgcagtggcatgatctcagctcactacagcctctgcctccagggttcaagcgattctcctgcctcagcttccctagtagctgggatttaaggcacatgccaccaggcccggctaatttttgtatttttagtagagacagggtgttaccatgttggccaggctggtctcaaactcctgacctcaagtgatctgcccgccttggcctcccagtgtgctgggattacaggtgtgaaccactgtgcctggccaacaactaattttttaaaaagcctttttgtagatacggggtatccctatgttgcccaggctggtctcaaatgatcatcctgcctcagacttcctgccttggactttctgcctcggcctcctgaagtgctgggaggattacaggtgtgagccaccatgcctggccaaaatttaatgtcttgcatactaaaagtccagaggctcaagaatggttcaataatgacatcaaggactccttctctttccaactctcttccctgtgattttccctattaacttcatactaagacagcccttacccatctcaatttggctgctgcaaaggagccaggagcggtggtgtggacctgtagtcccagctactcagaatgctgaggttggggtatcacttgagcctgggaggtcaagcctgcagttagccccttgtcccagtttggctgctgcatcccatccagacagggcagtatccaaaggaataagaggaactgtttccagaaacccccaagcagatgtctttcgagcctcattggccaggattggggcacattctatacctaaccagtcaactggcaagggtaatggaattgccctttcttccaactctgttcccaatagatacttcttttttctttttccttcctccctccgtccctccctttttccctgtctccctccttctctctgtcactgtcacctctctgctgctggagtacagtggcatgatcatagctccatgccacgaactccagggctttgaactccggggctcaggcagtcctcccacctcagcctctggagtagctaagactacatgtgcacaccaccatgcttggctgattttaattttttttagagatacagtttcactatgttgcccaggctagtctcaaacttctggcctcaagtgatcctcctgcctcagcctcctaaagtgcaggcaactgcacccagccctgttattttcattattcatctatattacatgtcttcggtcctttttttacccccacccaaagtcatatccaaaattgatccattacagatagtcatatgtagtgagctcatatctttgtaggtaccaacttcagttaaattatgaaaggaaaagtgttgattcttgttaaaatacttggcaaattgtggtccatgggctaaacccagcctactgcctgtttttataaagttttatttgaacacatcgtagctgacttgtttacatattatctatggctgctttcctgctacaacagtagaatggtttcaacagagactgtgtggcttacaaagcttataatgtttacttacctggccctttacggaaaaagtttgccgaccactgctttaagatgtcagtcgtacatttggacagttattatatgccacatactctttgcatttgagaatggaaagatgagtaaaatactcaggagttctcactctaatgggcagatagatgtgccatattgtattcataaagtgtgttaagtgcttttttttttttctttttgagactgtctctgttgcccaggccagagtgcggtggcttgattatagctcactgtgaccttgacctcccaggctgaagtgatccctccacctcagtctcccaagtagctggaactataggagcttgccaccactcccggcttttttattttttgtagacacggggtctcaccatgttgcccaggctgtcctgggttcaagtgatcctcccgcctcagcctcccaaagtgctgggattacaggcgtgagccaccacacctggcctgttaagtgtcacagtagtgtgtataagttaattaatactccttgcagcagcattttaagcacagtattctgtgctgtgagttctggatgtttcttgcttcctctgtttttttttctttgttaaatcttcctgttgtttttgtaaattgactgataatcttttaataagttaaccagagtgggtatttttgtttataacaaaaaatcctggtgagtacatggaataatgtggatgcattaatgcaacgtaaggacccttgttttttttttttttttttttttttttgagacagtctcactttgtcacccaggctggagtgcagtggcatgatctcagctcattgcagcctctgcctcctggattcatgcaattcacctgcctcagcgtcccgagtagttgggactacagatgcacaccaccaaacaggtcaccacgtctgactaatttttatatttttagtagagacgggactaatttttatatttttagtagagacggagtttcgccgtgttggctaggctggtcttgaactcctgacctcaagtgattcacccgccttggcttcccaaagtgccgagatttctggtgtgagccaccgcccccagtcaacataaggactctgagtgaaagggagaatgggaacatagaaaatctcagctgtggttaattgactttagatccctttggcttggattaaattttcttagccattgtgaggactcctgatacttaagctgtttataggttctagacttagaaaaactataaaaacttagtttggctattcagcaaagttagtatatatcaccagaaagcttactgctaatatctaatcaacaagcagcatggtaattacagttatcattaagtgtgtcaaattatctggcctttaatttgattgtcaacttaattgaaattattaaaacagttttggatagagatggttaaggcttgaatttgggaggcctagttgtaaaaagtttttttttttttttttttttttgagatagagttttgctcttgttgccgaggctggagtgcaatggcgcgatcttggctcaccacaacctcggcctcccaggttcaagtgattctcctgcctcagcttctcaagtagctgggattacaggcatgcgccaccacgctcggctaattttttatttttggtagagatgggggtttctccatgttggtcaggctggtctcgaactcccaacctcaggtgatccgctcacctgggcctcccacagtgctgggattgcaggtgtgagccaccacgcccagctgtaaggagctttttttgttccccatgttcatgttggttctctcttcttagtgatgcttattagtttggtcattttacaacataaaaaaagagaggaaactattgcccttgacactaatcaacagaaaaattaaaactagtattatgtgtaagattaattcaccaacaaaatcaacagacattttgaggcccaactgtgaaccaggcattgtatcagtttttcaaaaaagggagttaatatctagaaaattagaagcttaatttttttatagcaatagaactgccatatagcctcgttgactgtgttagagaatattgtctaattataaagacatttaagaaacatactgactttgttctgttttgaaaataagctataatatctgatgtttcaaagcacattaagggtagaattatttgtgagaattattttgtgtttgcttctttcctgttatataagtgacttgcatgaacctgttttcccatttctaaacatttttatgtgaatgtttaatgttttcttaagagtgaaatgaggaagttgaactggatttagctttcttaccttttagtatttaataattgcaaatgatagtgtattattttgttttctgctcaccttaggaacaatacaggtatgattttcctttttaaatttacaaaactcttagaagagatcctaaactcagtgtaaaactttggtgttaatattgcagttcagctttataaattttagaaatttgctttgcattttcagtaacatgtatattactcaaacgttgaatatttcatttccttgaaaatatcattaaaccagaaatcatttctacatgagcaagacttaatatcttatttaaaactgcctctcacccttacaggaaatccatttacagagatgatcataccagttattaatgtgcacttaaaacatctttagaggtagtctcttgacctgctaacaatagagagctttaatagcctacttcttgaaaagccctagtaattgtttcgaatgaacttgtctaaaatggtatctgagaaaagtagaataagataatcaaaagagcccaagactaggattttaaaggacttatgtcttgttaagtagccccctgacattgagcaagtcatttatctgaatcttaatttcttttttagaagaatgagagattgtaacacctgtcttgggcaggaagggggagggcagttattgtgaagataggaagtgtaggcagagtggagagtgagcattctacagatgctccctgtattcactacccttcttgcttttggccttatttctttacttgcaaaatggagctaaaaattcttgtcctctttgcttcactttgggatgacgggatgacatgtcattatttaggtaaaagtgcattattattgccataaaatttattaacactgagctaacagcataataagcatagttctttgtatattaaaggttttaaacccggggacctatgaccttgaatggggaaaaagttacatctttatttttacattttcttgttatgagtatagacaacattagcattagcagtacagtaccagagactgtgtcgtctattttttaatttaatttttattttttatagagatgggatctcactctgttgcccaggctggagtgcagtggcaccatcactcctgggttcaagtgaccctttagaatagctgggactacaggtgcacatcactacacacagctaatttttttattttttgtagattgcccagactggttttgaactcccggccccaagccatcttcctgccttggtctcccaaagtgttgagattacaggcatgagccaccataaccagcccagagactgtttctaatagaaacggtagatacttttggaatacattaaagctgtctcgaaataacttaactgttacttaaagtattaaaaaagcatatatattactcaaggtttgtgttttttatattttgataatcatattccagtgtaattggtttcttttgtaattttctgtattgtgtgcatgtattttatgcatttaaaaatacttttcttagaaagagttcataggcttcaccagcagggcccatgcaggaaaaataaaatgattaagaacttctttagtagattccattattgtgttgattggactgccagagttgccttattcagtttatactgttctttgttgtgcagctttctcccagtaaattggcagatgagttctcttggaatattttggtttctggagagaccacaattatgttcagaggtcatttctaagtccgaaaaggcagaaaaaaatttaaaataattaaaattaggcttagggaaaagagtatctcaaaagtaaaatcaggcaatctgctatgaattattgatgcttcagtgcaggcactgcatggactagactttataacacctgttttaccacctgacaggtgtgagtcttgtgccactgacctaacagagctcaatgtgtcgagcatgaggctatttttccattgcattaggtagaaaggagactgagggttaccctcagagttaaaagacaaaggagagaatgtttattgtgtctatgttgtctctaatgtgtggcactgtgtttgagtacatattcatatgagtggttttctcgagatgggagacgtttgctggctggcagcatctctccagacgacttgctgggtatgttgctgccatgactgctcttttattgcttttgaaggagtaggtatggaaaagagcacaatatattgctttaggagaagtaggtatggaaaagaggcagggcaagaccacttttaagacatttaagagtgggagaaaattaaggatttaattggtttaattaagtttaaaccaataaacttgcagattaaaattaagagaattaagagtggggaggagggagtaaatatttttatgagggaagagtggaaatatacaaatatttggtatataaatatgtgtctttgatatataatggtttaggcaatttattttttattattatttttatactttttttaatagaagaaaagaaagacttgaaagaccaggttttgtttcaagttagagatggaaccccaggatatgcatctaggtttctttgttttccatgtgacattttatgaaattatctattctgctactaatagatgccagtttcaattaaaaacatactaatatatttatagactagaaatgtctcttttttttttttttttttttttgagacaaagtctcactctgtcgcccaggctgaagtgtagtggtgtgatctcagctcattgcagcctctgcctcctggattcaagcgattctcctgcctcagcctcctgagttgcagggactacaggcatgtgccatcatgtttggctaattttttatttttactagagacagggtttctccatgttgcccaggatggtctcgaactcctgaccttaagtgatctgcctgcctcagcctcccaaagtgctgggattacaggcgcgagccaccatacctagccagaaatgtctcattgaggttaaacaatattctcttttattttcttttgagatgaggtctcacactgtcacctgggcttgagtgcagtggcgcgatcttggctcactgcagcccctgcctcccaggttcgtgcaattctgctatctcagcctccccagtagctgagattacaggcacacaccacacccagctaattttttgtatttttagtagagaccgggtttcactatgttggccagactggtctcgaactcctgacctcgtgatccgcctgcctcggcctcccaaagtactgagattacaggcatgagccaccgtgcccggcaacaatattctcttgatataaatattttccattaatcactaaattggtgtaaaaacataggttttaatagcatttatacatagctttgtcctgaaaaatttaaggtagaatttttacatctgtgtgttgtagaagctaatgaaagatatgtataagcaatttcatgaaatatgtttttaaaattcttatctctgtctctgatttttaaaattagaaacttaacaaaactctgttaagtactaactttctgtgtattcagacatcctttttaataatacctgtgttggccgggcgtggtggctcacgcctgtaatcccagaactttgggaggccgaggcgggtggatcacgaggtcaggagatcgagaccatcctggctaacacggtgaaaccccgtctctactaaaaatacaaaaaaaaattagccgggtgtggtggcaggcgcctgtagtcccagctactggggaggctgaggcaggagaatggtgtaaatccgggaggcagagcttgcagtgagccgatatcgcgccactgcactccagcctgggcaacagagcgagaccatctcaaaaaaaaaaaaaataataataatacctgtgtttttctgtgttgatggatgggtagttacatattctgcctttccacttaaccttatctaaatgttgacacagtttgttttaataataccaaaaaacaaataaaaaacccccacaaccctggagaagtccatgttatcacatagtatcaacattactttggtgattgtaatcattggctattgtaaagaatgctgctgtgaatatcttgatacagattactttcttttatatttagtttggggggagaaatatcttctggaggatttattacaaaagcagaatttcacattcaaaaaagctgtgtagcttttgttatgtattctctctctactttctggaaatgtggagccaatatctggtgatacctacaatacttacctacttgtttaccaacgttgttcgtcaaccttagcatgcgtaattaatatttattttgctagtttaatgagtatatcattggtaaaacatttgtagttttaatcagtagaacatttgtgtgttttttttaacgtaagttttgttggtgaagtttcttattgaagtgtttactgagtggaatctgagcaatatctttatatatttaaccatttgattactttgcataacagctttattatactgttgcaaatttttctactcttttttattttggtatttattttacctatgtagagatttaaaataaaatatatttatctgtttttattataacctatatatctttcttagtcatattatgttattcttccaaaactataatttttttcaagtctgtctttttgtttgtttgttttagattatttttaaaaaaacatagagacggggtcttgctatgttttccaggctggtcttgaactcctgggctcaagcagcccatctgtctcaggctctcaaagtgctgggtttacaagtaggagccactgcttctcctttctttttgaaaaaaatattaacttacttacattttattaaatggtattgtgaagttatgagtccaactttagtttacttatttagaataattctgtttttttcatcgtaagaaattagttttttaggccgggtgtgtgtggtggctcacatctgtgagcactttgggaggccgaagcaggcagattacctgatgtcaagagttcgagaccagcctgggcaacatagtgaaaccctgtctctactaaaaatacaaaaattagtcagacatggtggcagacgcctgtaatcccagctacttgggaggctgaggcaggagaatcgcttgaacctggaaggcggaggttgcagtgagccaagatcgcgccactgcactccagcctgggtgacagagcgagactccatctccaaaaaaaaagaaattagtttatgacaaaacctctacattttcattttacaagtttacagatttcattttaattattcgagcctcttaatattttagaatataatcattctggtcttttcattcattcctttgtttttttaaaaaaagtgatgatatcctgtggatttttttttaatgttttattttttacattttagacagaatcttgccctgttgcccaggctgggttgtagtggcatgatcataactcactgcagcctcaaacttctgggctcaagtgatcttcctgccttagcctcttgagtagctaggactacatgtgcactctactatgcctggtttatttttattttttgtggagacacaatctgtctgtgttacccaggctggtcttgaactcctgccctcaagtgatcctcctgcgttggcctcccaaagtgctggaattacaggtgtgagccaccatgcctggctactatggatgggtttaatacctgcctttgtacttagtggtttgtgaatatcttcctatgtcatttagtatttttctataacattttgataggctgcattgtgatctagtggatccttagatataccatgactgacctagctaaactctcagttttacatatacttttataaattgtactataattagagtctttgtagttgtatcattatacatatttgttaatattttcttcaggtatatttccacaaatgaaattagttagcagtcttttcatatcaaaaaaaaaaggaagacaggctgatacgttgtagaactctggatgctaggtgtcaaaagacttgtagtttggccatttattgcccacgtaacttaggacaagccattttggcttaggataaaacctttagtgattgtattactgattcaaaaaaatgcttatgtaatctaaacaactattatgattcaaaaaatggccaaagttttgatgcagacacacatgtcttatatatgtgtgaagaatttgaataaaattgttctatgaaatgtgagatgaagcaatttttctgaaccaataggttataggtcattttttgtttgtttgttttttgagatggggtcttgctctgtcacccaggctggagtgcattggtgatctcagctcacttcaacctgcacttcccaggctcaagcattccttccatcaccatgcctggctcgttttttttttgtttgtttggttttttttttttttttttttgatagagatggggttttgccatgttgcctaggctggtctcaaactcctgggctcaagtgatcctcccacttctcaaattgctggaattacacacgtgagctatcgcgcctggcctggaggctgttttaatcaagacctgagatgataagacctgaactaaggcagtaatagtagttgggatgaaaagagggtatagaatttaaaaattggactgaaatacatttaggttcatgaaggtaggtgagtgtagatgggaataagctaggaaatgataagaattaagaaatgaggggtttatacctccagcagaatttcattgcctaatggttcatgcctgtaatcccagcacttcgggaggccaaggccggcggatcacttgagctcaggagtttgagaccagcctggccaacatgatgaaaccctttctctactaaaaatacaaatattagctgggtgtggtggtggacgcttgtaattccagctatggaggctgaagcaggagaatcgcttgaacccaggaggcagaggttgcagtgagctaagattgcaccactgcgagcactgcactccagcctgggcgacagagtgagactccatctcaaaaaaaaaaaaaaaatctcaggaggaaatttcctctgaagaggtttattggtaatcagttacttgtgattgactagaatttagggaaatggccttacctaaatttcatttttattacaacttagagaatttctcttttattagttatggcatcttttctttttttgttttttagaaacacagtgttgctctgttgcccaggctggagcacagtgggaccatgtcggctcactgcaacctctgctttctgggttcaagtgattctcctgcctcagcctcctgagtagctgggattacaggcacctgccatcatgcccggctaatttttgtatttctggtatagatggggtttcaccatgttggccaggctggtctcaaactcctgacctcaaatgatcctcccgccccggcctcccaaagtgctgggattataggcatgagccaccatgcccagccttagttatggcatcttaaacagcaatcaataacatttttttgtttgtttgtttttgagacagggtcttgctctgttgcccaggctggagtgcagtggtgtgatcaccgctcactgcagcttcagccacctgggcttaagcagtcctctcaccttggcctcccaaagagctgggattacaggtcctaaagtgttgggattacagatgtgagccgctgtgctagctgaatgcaggttgttagtgtgcagagctttgcctgtttcatacacattgggtgaataagctattcatatttttctccattcatattttcaaatttacaagaagaaaaaataagccaggcgcagtggcgcatgcctgtaatcctagcactttgggaggcacagttgggaggattgcttgaggccaggagtttgagacagcttgagcaacatagggcaaccctgcctctacaaaaaaataaaataaaaaaactagctgggcatgttggcacgtgctcatgatcctagctacttgggagcccaaggcaggaggatcacttgaacctgggaggtttaggctgcagtgagctgtggtgttaccactgtactccagcctgaatgtcagaatgagacccatctttaaaaaaataaaaaaaaaaaattagtttcttccatttttttgtagattacattaatcagaatttccttttgtttttggcagtacagaaaaaaaacattgaataagtattcttaagctcttcagagtctgaatccatctgtcttcacttttattgttcctttctctaacatcctggatacagagatgaacctgactcagagagcaagcttttgggctctaagcagtgatgtttccttgttctttgttgtctgtaattaaaacttctggttagatcagtgtgtttataacatgttatttgagatgtgtggtatttttaatcttcagatttcagtcttcttagggaatgtgcaatgctagtagaagatattgaaaatgagaatgaaatcactccttgttactttaaatccaccttttcaaatattttaatttatatcttacacaaattatagttaaaatagaaaccttatataaaaagataatagattatgcttttttttttttaacagaaagtgataacagaattcattgaagtggagaatttttaaagaaggtaacaaaaagagaaagaaaatgccgaaaccagtaagtgtattttattacatttgacagtgtctcaataataagatatcattaaattcgttttggaacaagacaaagaatgttggtagagttgttggaagaaaaaggcactgatactactgttatttctctttagattaatgtggccaaattaattagaaacacagtgttgctctgttgcccaggctggagcgcagtgggaccatgtcggctcactgcaacctctcctttctgggttcaagtgattctcctgcctcagcctcctgagtagctgggattacaggcacctgccatcatgcccggctaatttttgtatttctggtatagatggggtttcaccatgttggccagaccataatactatggtattatgtggtcatgagttctaaggtcaaactgtcttagttgttaccttggttctgccaccaatctgggtgacctttgttaatttagctcaatctgtccaatttttaatttccttgcatataaaatgggatataattagttacccaagggagtatggtaagggttagaagaatctgatatatatttagtgcccagtaaatggtaacattgttaaatgggaggaaataatgagaggtcaggaagatctatgcattttagttttctcataattgtagtttagatgcaagtgttacccatactgatattatatagtcttagattttttttatttaagggtacacatgtgattattttacttagttttatagttatttggttcttcttgactaaggattcctttattcttaaggtgtaaatgttcttttcttaatctaataaagtgagttgttttttttttttgaatgtttcttttggccaattataattttaaagaaagtcattagttatcatttttgggattttctagcacggataacacttcagaatgacttaaagactcagcaggtcgcaaagtatgcattgttagagggagagaagaattaaaaaaaggcataaagatcaaaaagaaaatttcctatttgcagatgacatgattgtttctgtagaaaatcctcataaatctataaaacaatactagaaccaataactgaatttagcaagattgccagatgcaagattgtattaaaaaaaaatcaatggccttttttatataaaactagtttggttatttagttattaaaaaacatgacacacttagtaataaatgtacagatgctgtgcaagatctctacactgaaaaccagctatgagaaattaaagatttaaatacatagagaactataaaatatgtatagagatctttataagatgtcagttctccataaaagtgttcgtaaatgaaattcagttccaatcagttgaatccaggcagtcttctttgattaaaattgactagctgattctaaaatatattaatatatggatatgccaaaatgtgtacagagtagctaaagcaattaaaaaaaaaagaaaacttacactcctggatttcaaggtttattcttaagccactaaaataagacattgaggtattggtgaaagaataaattaataggatcggtgaaatgaaaatacaccaacacacatatacacatatgtattcattagatttttgacaagggtgtcacacaatttactggagaactataattattttcaacaaatggtattggcacaaagggttatccatacagaaaaacatgaacattgactgttgtctcacaatttacaaacataaactcaatggattatagacctacatgcaaaagctcaaactgtaaaacatctagaagaaaacataggaaaaaatttttgtgatcttagagtaggcgaaaatttgttatgtaatacacagaaaatttgaaccattaagaaaaagttggacttaatcaaaattaaaaacttttgctcttgaaagacagcaataaaaacatataaaggcaagacagtgggagaaaataattgccatataaagttcttttacagttgaataataacacaactcagattttttttttttttagtggacaaaatatttgagcagatatttcacaaaagaagctatattaaagactggtaggccgggcatggtaaatcacgcctgtaatcccagtactttgggagactgaggcgggagtatcacttgaagtcaggagttcgagaccagcctggccaacatggtgaaaccccatctctactgaaagtacaaaaattagccaggcattgtggcacattcctgtaatcccagctacttgggaggctgaggcaggagaatcgcttgaatccaggaggcgaaggttgcagtgagccaagatcgcaccactgcacttcaacctgggtgacagagtgaggcttgtctcaaaaaaacaaaacaaaaaataacaacaaaaaaaagactggtaataatccagtgtagatatggatgtggagcagctgcgactttattgtatttttgttaggaatgtgaacgtttacagctactttggaaaactctttgccagtataattgagtggagagtgtttattgttccttaaagagtcaaaattatatgcagttggatatcaattgtgtgttgttgattcattaaagattctggaagtatagaacttgccttgtggagaaaacactcttgaagctagataagtttcagaatgtggaagtttttggattttagaaagatgaatatacgatatattatgtgcatatgtcattataacatgaaactcccatcaaggtctatggcatcacctctaaaacatttgtatttctatagtttaatgagtgaatagtcacgtgaagtggaataaattaattcactacaagtgatagtcttatatcacttcatgtcagatttttcctcaaaattaactcatcttcaggtttccgtgcttttaggatgtcaaaattatggaataggaactgtggatccatatttacaatacccacaaagccataatgatctaggagaaaatacctaacaaatgagtaaactgatttatatggagcaaattataagcacttctttcaaaagattttgaaagtcattaaaggagatctaagtcaatgtacagtgagaaaaccatagtcatgtatagagtctatattaataaaaatgttaattcttacccaaagataccaaataatttcgtgttgttccaatactaaatcataaatggtgtattttgtaaagttcacagttttatatggaaccaagagcaaagataatgatccaagactagtcaaaatagttctgaagaataatggagacttgccctaccacatatcaagacttatttaaagaagtactaattaagacaatatgatattgagtagtttaattgaccagtggaacaaaattagatccacacttatgcagatacttgatttgtgacagcacagactttggagaataaatgaactaattaataaattatgttgggattaaaaaaaaaccctgtattattttcattcatatggagattaaaaaatgaaattggacctctaacatcataagcaaaaatcattgaaaattgtgaaaatcaaaataggaaatatatgaatatccttatgactccagagtatggaaggatttcttaaggatggcaaaaaattggctgggtgcagtgactgattcctgtaatctcaacactttgggaggctgaggcaggtgggtcacttgaggtcaggggtttgagaccagcctggccaacatttatactggcccgtttatactaaaaatacaaaaaatagtcaggcatggtggtgcatgcctgtaatcccagctacttgggaggctgtggcaggagaatcacttgaacctggaaggcagaggttgcagtgagctgagatcacgtcactgcacactagcctgggtgacagagtgagatgctttctcaaaaaaaaaaaaaaaaaaaaggatggtaaaaaactggtatctgtgtgtaaaatatttataaattcaacattaaaattaagaatgtcagtttatcataaaggacactatggagaaagtaaaatgacgaaccacaatatgggaggttcttttgtaagaaataactgacaaaggatcagtatcaagaatatataaagacttcctacgttaaagtaagaaaaaacaacccaatagaaaaataagccgtatgcgtgaacattcgcagatgagaatgagtggtcagttaaacgtattgtactagttttccattggtctatgacaaattaccacaaatttagtgttataaaacagcacccatgtattatcccacagttttataggttagaaatctgggatgatgtgactgagttccctgcttcaaagtcttataaggctgaaatcaaggtataacttattctgcaaccagccagataaattgattagcttaggccctcctagataatcttcctgttctaaagtcagctgattagtaatcttaagtacttctgcaaaatccctttaatcatgtaatgcaacataatcatgagcatgacaccaggggccatcttaaaattctgtatgcacatgccatgtacagaaatgtggatgtcatcagcaatcgaggatcccactttaataccatattgagataccattttctgctaactgaattgtcagatattaataaatctgataatgcccactgttcctggaaatacagaaaagcaagaattcttatacaatgctgtcaggagtatacattgacacagttacattgtacaattcagcattatgtggtaaaagtagaaggtgtgcacacttcattactcaagaattctgagtatattctggagaaattctgacactcggagacatgtacgagaatgttcatagcagtattgttcttaatagccaaaaaattggaaacagtgttcattgacaggaaaatgggtgagtaaatgtttgtttggccacatgcagaatgttgcatagcagtgaaagttcagttacaaaaacatcaatgaatcttagaaacatatggtgaaaaattaaactagtatagtgcaattttaaagaatttattgaagtagaatatacataccaaacagaatatatgagaagtgtgtagtaacagtagtcccagccactcaagaggctgaggcggtaggatcgcttgagcccgggaggttgaggctgcggtgagctgggattctgccactgtgctccaacctaggcaacagggaaaaaaaagtgtgtagttgatgaattttcgtaaagtgaatatacccatgtaagcattgcccacatcaagaaagaaaacttgatcaacaaatatcgtgcagttataatacagctaaaaatcaagaaaaatgaagctattttacaaacagatacatatatttacgttagaaccatttttttaaaagcaagataataacaaaatttaggttagtgattacctgttggtatttacaaagaacaaataacagtggtatatgcaacattatttaccatttcttgttattcagttggatggtagatttatgggtttcgttttattattcttcattgtttatatatgatagatgttttgtatatatcatttcttaataagatacagttttagaaaagaaaaaaataagattattttaaagaaggatgaatctgtaagatctgattacagaagttattccaggtgaaagctataatgtgctgaggttgtgattgttagacatatggggaaataagaagtctgatttagagtttttatagtgtgagttaaagttagataaaatggcacaagctgtgtcctcagtaaacctacaggctgatggaaaaagatacataaaaacaaatgcagtaatacgtattaatataaaattttaaatacagttgttacagaaacagtgttagtaggaatcgctacaggtttatactggttaagggaaaagtaaagattgttagaaaatcgatacagaaacagcaaatgaagtgtgggaaaattaaaggagaaataagttaataaaagataaaataatttaaaaagctaaaaagatatatttggatcatgtgaagaattctaggtgaagatgctattctgtggtaaaattattttggtaaggcgtgttaagtttttgagatattaggtatttacacaataaaattattatttaaaatagagtttggagctaggcctggcggcacacgcctgtgctcctagctacttggtagattgaggtgggagtataggtttgcgtccaggagatcaaggttgcagtgtgccatgattgcacgcatgaatggccagtgctctccagcctgagcacaacatagtgagaccctgtctctaaaaacaacaaaaaatagaatctagcaaataaagcactgtagataaatgctttcctaaagcgaataatgtatttacagtatgaataaaatgaaatctgattttcatgttgaaagaaatatgggatagtgaatcacattcaaagaatttggagttagacctcaatttaaatacctcctttgccttttttgttttgctttgtttttggaggcagggtcttgctctgttgtgcaggctgaagttcagtagtacaatcatagctcacggcagccctcaaactcctaggctcaagtgatcctcccatctcagcttcctggaaataacaggcacatgccaccacacccaactaatttttaaatttttcatagtcttgctgtgttccccaggctggtctcaaactcctgacctcaagagatcctcccaccttggccttccaaagtgctgggactaaagatgtgaggcaccatgtccagctcttgctctgccttttaatatccacgtgtccttaggtgaataatggaaactctttgcgtttctgtagaaataaaggtagtatctcctagtattatagcaagggctaaatgagagtatggaaagcccatagcttagtgcccagtatatgttaagtattcaatagatgttcctaaatgaggactttataagctctttgtttttcaaatagatttaagatttcttgtgattaaaataaaactttatcactttaataaagaaaatcataaaagttttctcacgcctaataacttctcttctacttattattccttttatttttattacagatcaacgtaagagtaactacaatggatgctgagctggaatttgccattcagcccaatacaactggcaaacaactttttgaccaggtattacactgcatgaaatatgcaacttttgacaccatagtgtgaatgttgttgcatacctctttctctgtttttctgtacttttgctgataatccaacagtgtaccacttggaatttttcatagtagctattcagatatccctactacagcagtagggatattctttattctttcacattcctacatttgtgggagaggacttcttgaaaataattttcagcaggtatttatttaacatttatgagaatcattgtaatggtgactaaaagggattcaaggataatccacaaagttgttgagtgaaatgagtaggaatcctgggcagaaggaacagcaggagtgaaaggcatagggaattacaggttgagagcatctcttatccaaaatgcttgggaccagaagattttggatgtttttagattttggaatatttgcatatgtataatgagatatcttggggatgggacccaagtctaaacacaaaattcatttatgttttgtgtacaacttatacacataggctgaaggtaattttataaaatcctttaaataattttatgcatactgagttttgactgcgacccatcacgttaggttaggtgtggaactttccatttgcagagtcatgttggtactgaagaggtttcagattttgcagcatttaggattttggatttttggattagggatgctcaacctgtataggctatacagagatccctaacaacaatttggtgtcataggttcataatgtatgaggcaaaggttgggatatggaggtcaggtatccggtatgttaaggaactgggactactgatcttatctttcttctcagtcttgagtgcgtattagtcacctgtggagctttaaaaaaagggaaaggagacagtgcttggaaaccccttccagagatgctgatttaattgtctgggcctactctaaattatcagtattttaaaatttaagcttcccagataatgttgtattgcaatgtaagcaagttttgctgagaaaacgaggtaagggattggccccagggattaagtaagaacatgaagaaactgttgcaaagacagaggaaggtggtatatatcatgtgtggcatgaaacttagaggaggataacttttatataaacttcacgtacactttttcttaggagcaggagagcaatagcctgtagtcagaataacttgatcttaaagaaggaaagagtttctagcatttcagcagtaagtaacactagatactttggttttgttagttgtcattctgtcaaatacagattcaaatctgatgaaataaaaattctaaattctctaaagttgtttattctcctgacaagtaatatacttaatctcctgatttggtaattcataaatttaaaagtcctgataaggcctttttggatcatgaaaagctttttgtgtggatgtgcaaaattttaaagcaaaatcataaagagctaagttcaccacaccttgtgaaccaatctccacttttttcttttttccaaaccacttttgttctggtataatatccacttctgttgattcttctgtgcctcctgtttgtgaatatacagtctatcttatttgaaaaaaatgtgaatagagttagcatttattgtacttcatagcaaattgaaatgttatttatagtaagtgagatgtttgtggcagccaaaaactaatcagcaagttatcctctttggtattgtatactgagaaataaaacttgttttttattaagtagaattactttcacttggatacaggaaaatgaaaccatttattatagggcagtgatgtacagtggtttagaagtgtgggcactggagtcacactgcctgcaatagttgtagttgcagctgtttgactttggacaaattaatctctttgtcttatttttctcgtttgtacaattaggatgatggtaacattacttcttcagaggtttattgtgagagttaaatgaaaatctatgtaaagtgcgtagaacagtatttgatggttttgtgtatatctctttctatttatgtagataaatacagtgtcatgtgccgcataatgacatttcgatcagtgacgggccacttatgcaacagtggtcccgtaagagtgtaataccatatttttactataccttttctatgtttagatacgtttaaatacacaaatacttaacagttgtgttagagttgcctacagtattcaatatagtaacatgctgtacaagtttgtagcctaggagcaacaggctgtaccatatagtctaggtgtgtagtaggctataccatttaggtttgtttaagtatactctgatgttcatacgatgatgcaattgtctaacgatgcatttctcagaatgtatccccatcgttaagcaaccctgactacacacacacacacgcacacatgcacacacagttcatattgtaaatggtccaggttattattacttatttctttattaaaaaaaaatttttttttagattggctctcactcctgtcgccccaggctggaatgcagtggtgcgatctcggctcactgtaacctctgcctcccaggctcaagcgatcctcccacctcagcctcttgagtagctgggaccacaagtgtgctccaccatgcccggctaatttttttttgtatttttggtagagatggggtttcgtcatgtttcccaggctggtcttgaacttctgagctcaagtgatccgcctccctcggcctcccaaagtgccaggattacaggcgtgagccaccgtccagcctggtctagattattgagtattgttatctgttatggactcttctcagcagttctttagtccctgttctatttcctgactgctttccttgaactcaaatgcagtgatgaactttccttgaactcaaatgcaaggatcgaaaaatgcagactttacttttgtatgtagtgtgtgtgggataagctggcaggttcaggtcaagccaggggtaaactgggtcctctaaaatgagagcacatagctacatgagtacatgtgtagtaaagccccatgtctgattatgatgttaaatcgaggccagctgctctgtgtttggggactctgagtgcttgaagtcctttggtttgcttcttgctgacttttttcttgactagccttctcctttagctgcttcttgtgggattagtgtaaagagtgttcatacccccaaagagtgtgcaagaacatctgttacggtgaaagaagtattaaaatatatttttaggctagacttggtggcccacacctgtaatcccagcactttgggaggccaaggcgggaggattacttgaggtcaggagttcaagagtgtaataccatatttttactgtaccttttcctgtccaatattgcaaaactgtctctactaaaaatgcaaacattagctgagtgtggtggtgcacacttgtaatcccagctactcaggaggctgaggtgggagaactgctgaaacccaggaggtagaggttgcggtctgcacttcagtttgggcaaaaaaataaataaattaattaaaaaaatatatatatatgtatatataatatgtatttttaaacatttttaaaaatatatgctttatagtgtattagcatgatagtatgtaacttgtaaataaatatacctatgttatagttacgtgcccaagcagattcacttctaaaagtatgtgatcagaagtttatgggagcttaaaggacagcctcactaaaatatattaattaaaaaaaaaacattctaggagcaccttctgaagaagtagagaaccactggggagacagggccttttagggaatttcacagctgagctttcttgttccttgtatttgtgtaatagtctaaagttagttaagctattatcccctgtgcccactgtggggcatctcccttttacttaccattgtgaatctcacagagtgtggaggcagaagctgagcccagctgctttgttatacttctctctgctgcttttgacctgtacattactactcctgccgctccaagcttgaatgttttctatggcactgctggggcaatctgtcttttaccaaagttagattatttggaatctccttttgtccacattgaatttttcattgtttgacattgatcagcttttgcattatcagtatgagactttatattccacatcttctagaaatttctcactttttgcttttttttttttttttccccgaaacagagtcttactctgtcacccaggctggagtacagtggtgcgatagctcaatgcagtgcaacctccgcctcccgggttcaagcagttctccgcctcaacctcctgagtagctgggattacaggcccttgccaccatgcccggctaatttttgtatttttagtagagacagagtgtcaccatgttggccaggctggttttgaactcttgaccttgtgatccacctgcctcagcctcccaaagtgccgagattacaggcgtgagccaccgtgcctggcccactttttgcttttttgatggtaacattttctaaatgcttttttcttatttttaattttttttttcttttttttcagacagggtcttgctctgtcactgaggctggagtgcagtggcataatcacagctcactgcagccttgacctcctggacttaagtgatcctaccacttcagcctcctgattagctagaactacagatttgcttgactacttagctaatttttttttttttttaagagacaaggtctccctacattgcccaggctgttctgaaactcctgagctcctcctgccttggcctcctaaagtgttgggatcacagatgtgagccactgtgcccagccagtgttttttctttttttctgtcatttcagtgaaaattttcaagagtgggaaagtaaatggaagggttcagtttgctgtcttgaaaccaaaagcctggaatgttttaagattatttgtgtgtgtgtgtgtgtgtgtgtgtgtgtgtgtgtgtgtgtgtgtgtgtgttttgagacggagtctcgctctggcacccaggctggagtgcagtggcgcgaactcggctcactgcagcctctgcctcctgggctcaagcaattctactgtctcagcctcctgagtaactgggattatgggtgtgcaccaccacacctggctaatttttgtatttttagcagagatggggtttcaccatgttgaccaggctggtcttgaactcttagcctcaagtgatctagctgccttggcctcccaaagtgctggtataggcgtgagccaccctgccctgccaaatgttttaacattattttttaaaaaacaggctgggcacgatggctcatgcctataatcccaacactttgggaggctgaggtgggcagatcccttgagctcaggaggtcaagaccagcctgggcaacatagtgagaccctatctctactaaaaatataaaaaattagctaggtttggtggtgcatgcctgtggtccgagctactcgggaggctgaggtgggaggatcacttgagcctggggtgggggtggaggttgcagtgaactgagattgcaccactgcactccagcctgggtgacagagtgagaccccgtctcaaaacaaacaaacaaacaaacaaaccaagggccaagcgcagtggcttgcatctataatcccagcattttgagaggctgaagtgggaggatcacttgaggccaggagtttaagattagccttggcgacatagcaagacccctgcctctacagaaaacaaaacaaaacaaaacaaaaaaaaacattaactaggtgtggtggaatgtgcctctagtcccagccattcaggaggctgaggcaggaggattgcttcagcccaggaggtcaaggctccagtgagccgtgaatcacaccactgtactccattgtgggtacagagtgagaccctgtctttaaaaaaaaaaaataagcaaaaactcccacaaaaaaccaagaatgtttattatttaagaactgatattgaatctttctgtaaagcttttaaaatgttaatgaacttttacctcccctggatcattttcctcattttattttaaatacagatttttttaaaaaacatatgcttttgttaggtgtgggtaagtcctgggtgtgtatcctaactccaccactttatttactcttactttattttctttttttttttgagacggagtcttgctctgtcgcccaggctggagtgcagtggcacgatctcggctcactgcaagctccgcttcccgggttcacgccattctcctgcttctgcctcccaagtggctgggactacaggcgcatgccaccacgcccagctaatttttttttttttttgtatttttagtagtgatgaagtttcaccgtgttagtcaggatggtcttgatctcctgactttgtgatccgcccgcctcggcctcccaaagtgctgggattacagacgtgagccactgcgcacagcctacttagtcttacttttgagtatctaccacaggctgatcattctgtgagatgctatggattttaagacacataaatcaataatctctgtccataagtattatgcagtcaaggagggtaaatagacacactgctaataacacaattatgatagagtaaattttctaatagcaggatagataaagtcctatgggaatatcagggaacaagtgattaattttatctagatggtaggagagctttattcacagaaggcacgttagttgagcttgtccttaaagaataaattgttcaataagtcataaaaatacagaagacccattctaggcagaggaaaaaacatcagcaaaattgtagaagggtggaatttatggtatgttctaagaatggtttcttgctcagtgaaggtagaacatggaatatatcagacttttcttatcaccaaaatgataccatttgccctaaatataccaatagggtacttgtgggggtaaatagaaattggaacgtatgattatgaaaactatatatatatatatatatattttcaagactcttgttattgttgaggtcatgatagataaggaaaaggaggtatgaaaaagtggatcaagtaagaggattgaagtgacactacaaaattgaggattagaggccaggtgcagtggcttacgcctataatcccaagactttggaaggccgaggcaggcagatcacctgaggtcaggagtttgagaccaacctggccaacatggtgaaaccccatctctactaaaaatacaaaaaattagctaggcgtggtagtgcatacctgtaatcacagctactttggaggctgaggcaggagaatcacttgaatggagacggaagttgcggtgagccaagattgtgccattgcaccccagcctgggtgacaagaacaaaaaaaaaaaaaacaaaaaaaaaaacttcttttcaaaaaaaaaaaaagaaaaattgagtatagaaaacttgaatttgagttttcaaaaatgttcctttaatatcttaaatttagggaaagccttttctatggcaaaggaatatacgtatacttacatagttttgttctccttttgaagtgtagtatcatctagacacaatgtgtatgttggactgaaattgtgtttttttgttgttgttgtgttttaggtggtgaaaacagttggtttgcgtgaggtctggttttttgggctgcagtatgtagacagcaaaggttattctacatggcttaaactaaataaaaaggtaaaatatgtacgataacattaaactaataattatgttaagttgaagttatgaatttgtgctggaaaagctaagtctgactgattgcaagcttccttttgtagttatctgttaatcattatgaggtaccatgtttttttaaattcaatcaggcaccatcagcttatcatctcaaaaaaaaaaaaaagaaatgcttacttttcctatttgaaaacttagcctataacaaatattaaagcagatattacaaatggcatactaagtacttcaattttgatgtaaatacctgtaggataagcttctcaagaatatgaaaaaaagttttcaatttggttattagaatctgagttataggtcacattcaagagcatagaatcttttaccacatatatttgtttacagatttagactattacacactaaaatcttcatagatttagaatctatttcacttcattttcttccaaaaagaatttgatgtgactaggtctaattattgtaaacttaagatttttgttgattatacttgaaattatttttccaggtaacacagcaggatgttaaaaaagagaatcctttacagttcaagtttagagctaaattctttcctgaagatgtttctgaggaattaattcaagaaataacccagagactcttcttcttgcaagttaaagaagccatcttaaatgatgagatatattgcccgccagaaactgcagttcttttggcttcctatgctgtccaagccaagtatggagattacaataaagagattcataagccaggctacctggctaatgatagactcctaccccagcggtaagtgaaacatgcgtttgcattatattgtctgaaaattgtattctagaagtctataaataaaacgtttttcaggtttttttttttttttggagacagggtctggacctgtcacccatgctggagtgcagtggcgtgatctcagcccactgcaacctctgcctcctgggttcaagccatccttccacctcagcctcctgagtagctgggtctataggcacatgccattatgtccgctaattttttttttaatgtatttttcattgagatggggtttcatcatgttgcccaggctggtctcaaactcctgagctcaagtgatctgcccgcctcagcctcccaaagtgctgggattacaggcatgagccaccgcacctggcctcttttttttttttttccagattttaagttgccagctggatcatggggtatacttctaaaaatcattacctagcacctccatagatttatatgctctgtaattacctaaggttgatctatctcttctttcctcattcccatagggtaagcaataaatggaggcagtgataatttggacttgaggaaaggatgtgactgttgctgcttggtacaaattctaacacaggcaggtgcttaataagtgagagtaagtggcaggctgtgttttcttcatagaattctctgactttttccccccccgagatagagcctcactctgtcacccaggctggagtgcagtggtgcaatctcagctcgctgagattggagtctgcctctcaggttcaagtgattctcctgcctcagcctcccgagtagctgggattacaggcatctgccgccatgcccagctaatttttgtatttttagcagagacagggtatcactatgttggccaggctggtctcgaactcctgacctcaagtgatcctcccacctcggtctcccaaagtgctgggattacaggcgtgagccactgctcctggctgaattttctgactttctgaaaaggctttttaaactaggttttcagactcctaggctggtgcattgttcttatctacagtgtactgctgcttctataatggctattttaaaataatatggcataggaaaaaattatcagaagacctaaattttgagtaccgattccaccctttgctatatatgtgaccttaggtacatgacctaaaacctctgagctcagtatctaaatctgcaaagtggggataataatccttctctggctaccttctagtttatgattataattaatgaactatatgatttacagttttaattgtcaagtgtgaaacgtgttatttagtagtattgatggaatctagaagatggaacatcaaatattactttttaattttttttttttttctttgagatggagtcttgctctgttgcccaggctggagtgcagtggcacgatctcggctcactgcaacctccgcctcccggattcaagcgattctcctgcctcagtctcctcctgagcagctgggattacaggcacacacaaccacacctggctaatttttgcatttttagtggagatggagtttcaccgtgttggtcaggctggtctcgaactcctgatctcaaatgatccacccgcttcggcctcccaaagtgctgggattataggcgtgagtcaccatgctcagccaaaattcaattattaaatgtcacagtgttccgccctttaattttgtagcaatagtagtcaccttggaaaaggatagaattatgtaagttgttcaccaagagagtcaggaatatgagatatctgatagtctgtttatattctggttttgaatgttattctaacctaagattcttcatcttagattactgaattgagtaatcagactattatggtggaatttcatttcatataaggattaccttttgttttataatcagaattactttaattttttttttaaatgttaaagaataggaatgctttatctaaacaagtacagcattgatctttcagtgttaagccagattgctgtttggttgagcagcagatgaagtaattggcttacatttcataactcatgtgattgaaaaaaatctcttaaacactacaataacacacaagcacagtttattttaaatatgggtgtgctctaacctactctatttaaaaagaaggaaggtggctaaatgctttagatagggttgcttgtggttgctagtgcaaatgcctatttcaagatttgttccttaattttgtaggtcagttgttccttcagagttgatattccatggaggactaattcaagccatgttatcttaaaatgagacttagtcataaagttagaataccatttttttttcattttctgtttagaacagagaggatattttcacagtgattggcttattccagtatggtatatcggacactttttctcagtatctaagtacagtctggggaggaaatgagtaattaggttatttggtgataacaaatcaaataaaataatttagtgattctgatacattctgatttcttgtattgaaaaacccagatgagcaatctgttcttactgtagaaaagtttagctcttgtggtatagataattagctccaccagatagtattgcttccctttgaaaagagctaaatatacataaacttttacataccaggtttctgacttgggcggctgggtatttggtaataccttttatcaaaatgagtggaagaaaaaatacatttgagggggaagatgaattcagttttgaacctattgagtttgaaatatgtgcaatataaccaagagagatatctggtatttatttgcatatgtgggtgcagaccttttagaaacagtcttggactatagatacagttttgggagtaatcagtgaatagatggtaattaaaccatgagaatgaaagagatcaacctaccaagtacataaaaatgagaaaaagacctaggacagatcttgttggacctcagcttttgtctttgggttctgcattcacagagtcaaccaaccacagattgaaaatatgtgaaaaaaataacacagcaatgaaaaggtacaaaattttaaaaatacaggataacaatacatagcatttgtagtgtattagtgtattattatactacatagtagtaataatatagtgtattagtattattagcctagagatgattgaaagtatacaagaggatgtgcataggttatatgcaaatattgcaccattttatatcagggacttgagcatccacagtttttggtatccaaggggagtcctggaagcaatcctttatggatatggagggacaactgtactgagacactggccacagattcaagaataattctatactagaagatggctgggcatggtggcacatgcttgtaatcccagctactcgggaatctgagacctgagaatcactggaacccgggaggcggaggttgcagtgagccaagatggcgccactgcactccagcctgggcgacagagcgagactccatctcagaaaacaagaataataccagaagagtattatatcatggaagccaaggtaaaagaatactttgatgaagagaatggtcagcactgccaaatggtaccaagaggtcaaatatgaggagaactaaagtatctgttggaataaggagcttggtagtgaccttagaagagcagtttccagccgggtgtggtggctcacacctgtaatcccagcactttgggaggccgaggtgggcggatcacctgaggctgggagttcaagaccaggctgaccaacatggagaaaccccgtctctactaaaaatacaaaattagccgggcgtggtggtgcatgcctgtaatcctagctactggagaggctcaggcaggagaatcgcttgaacccgggaggtggagtttgcagtgagccgagatcatgccattgcactccagcctaggcaacaagagcgaaactctgtctaaagaaaaaaaaaaaaagaagaacagttaccatagagtattgggtgtttgagccagattatggtagactgggggcagtggatgtcaggtatggaaattgaggttagtgtataatggacagtccataaaagaaagttgtctctgaaaaagaaaaaaaaataggggttgggaaaaattgattaattcatttattcactctacaaattttcgaggccctctttagtactggcattgggcatataattatggtaagcaattgactgcactgggttatgtctccaaggctgattgcatgcctctctgtgagcccagaggccagacagcaagaaagacaagaaactgtggaaacctaagctctctcagaaggaagatgaaactcttctccccaaaagcaagagcttggaaaagatgcctagagaaaggagcagagtataataagaacataacagtatgtctgagacccctttaaggaatttactctaagtagtaggtaacttatccagggggagattttatcattcctttatgctgccaagaaatccttgggtttcatgcaagattttttatatagtaaaacagtaatattttaacaccacagcttctgctgtcagtaaagtaggatctggtaaataaaggtgaataattatcatatgagccaaagagaatagaagtcacaaactgtagtgtgcatagtaggtaacttataatcatgttgactttgctgatttggtgttaaaatagtagtagtagaatataatgtttgtatttggctgggcgtggtagctcacgcctgtaatcccagcactttgggaggtcgaggcaggtggatcacttgaggtcaggagttcaagaccaacctggccaacatggcgaaaccccgtctctactaaaaataccaaaaaaacacacaaaaaagaaaaattagccaggcattatggcgcacgcctgtaatcccagctacgcgggaggccgagagcatcgtggcacacacctataatcccagctacttgggaggttgagacaggagaatcacttgaacccaggaagcagaggttgcagtgaaccgagattgtgccactgcactccagcctgggcaacagagcgagactccatctcaaaaaaaaaaaaaaaaaaaaaagaatgtatttgctcacatttgaattaagaacactggaaggatacaaaaacaagttatttggggggtattggactggagtatgacttttcactctactttttaattgaaagtattacctacctaaaacaacaaaattagtagcaaaaaagtaaatacataaaggaagaattagggcccaagaattctggttttcagtctggtctttatctattaacaatgagccatttttttatctaatgttttattcctttgaactgtttgggttcctataagctatctttgtaatcactttatggagcaagtattatttcaaggaatttaaggatcctagacacttaactttgagataattactgattattatgcagttgtaaaaaaaagagatccctggtatccttctcccagcattccctgatggtaacatcttgtgtaactacagtacaatattacaaacaagatattgacattggtacaatctagccaccttattcagattacatcagttttacctgcactcatttctgtgtgtatgtaatttagttctatgcaatttcatcatgtgtattaattgtctgacaactaccacagtcaagttactgaaaggattctttacttttaaagtgtatgcttttgaatcttaaagtcattataatttttttttttttttggtcctcttagtgtattggaacaacacaaactaacaaaagaacagtgggaagaaagaatacagaactggcatgaagaacatagaggaatgttaaggtatttgggtagctattttctatgttttcttttttccttcaaagtattttcatgtcgtaacatttattattacattatttccaaaagattgtttgacttatgtaaagtactaatttttaattccaggtattttgcaactttagtttgatatgctcctacttaaatatattacatttagttttatttcaacagggaggattctatgatggaatacctgaagattgcacaagatctagaaatgtatggagtcaactattttgaaataaaaaataaaaaaggaactgaattgtggctaggtgttgatgctttgggtctgaatatttatgagcatgacgacaagtaagtaaattagttgcatagtgaactagtcattgttcagtggtctaaatgacgttaatcttatgtcctgtttttcaaagtagtttcttgtcttgattacccttactattttcaaactaaaagatgaattaatgacacatagacttgtagatattttacctccattttcttatcaccttgcagtttcagagttctacttttcagtgtatttatcaaatgagatgattgacttttatttgaattgtgctgcttttagctcttgtgagttatgtctagtaacttaattaaaatttgctccctcgataggtgagaaataattctttaaaatgctattatgcttgacaaatagattgaaattgaacatacataagaaatcaggagcaatgagagaatggatttaataaatatgtctatcacatcttagaggatttttttgaacatttatatataggaattgttttaaatatgtttggacattaatacaatagaatatccctgtattacacatattgaacactgtaattatatcttgaaattgaccaaatagttttttattatacatatataattcatcaatattttattatatgtataatatatgtatatttacatatacatgtatatgtactatacaaatacatgggtaaatactatatagagacggtatattatacacatacacatgcaatataaaatacatcagactcttacttttcaggattaataactcaattgtcttagactttaatttatttaccataccacataagcatgcaagtctatgccagtaattaatgccttttcctaaggcattattctttattctaggttggctccagaattttaatttttattactacagatatctaataaaatactaatttcaaagcatatgtgattccaaacaagagcattttactatttttaccctaatatcttctcatgtttttattacaaagcaagttagaaggttatatcatttagaagagaaatttttgaaaagcaaaaatgacttcaagactaatttttgtaaactgaatctttttcttttgttttagagaatgggatcttgctatgttgcccaggctggtcttgaactcctggcctctagcaattcttgcgcctctgctttctccagtgctgagattacaggcgtgagccactgtgcctggcttcttaatttttttggtggtggtggttctggcacatattggagcaatttttttaaatgttaaaaaagttattgtattagcttccaggcttacctcacaagagtgttatgagaattatatgaggcaattgctttagaatttttcaaagtagcatataaacgtagcatagtgttctctaaaatactatgttgcattcctgcagtctccgttttaagcatgttactttgacttatatcaggggccattagagggtcctctaatatgcttattgagtaaagaatgttttatgtagaaaagactctgctgtgctgcagtacctactctgcttgagaactaaaaggaatataaataggtaaaaattcatgctgtgttgtcagaagcctggctaaaagatgtcttctggccagtataggtgtcaaaatcatttctcagtcttagttattaggacaataggacaatagtgatgcatttgataggtagtctgaaacagtaaaatacatgaaaaggcagaaacaaaatcacttattccaatatgattccctatatctttgtgtgtagggtggtaaaacggagtcaactgctgtgtatagtctcaagagtttgaattccatctctatcatttatccaaatatttatgtatgtgagtgtttaaaatttttgagatataattcatataccataagattctttcaaaatatactgaaaattaagtatttttagtatattcgtgaatatccagacattttcaaattaaacacaggaaggaagtactgtttttttatttgcagtaacttgcccgtaattcacatgagaagttataaaggcctttttttttcttcccacttcttacacatatttaaactgtagttgtagcttgaatccaaacaataaaaactgaacagctagttcaaaccccaggaggctcagttctacacttgggtcaccaggtagtttttttagataattttaggaaaatacactgcttttaaggttcatgacacatttatgaaatctttggacagttgtttgttttatatgatttatcagttttccccttaaaagataaggtcaactgtagttatgaataagttaatacattttgaaaatctggaactcttaagattggtcattcagtcagtttaggtcctaaacaggaattttattcattgtttcctgcctttaattaaggagatgctttcattttttaaggttaacacctaaaattggttttccctggagtgaaatcagaaatatttcatttaatgacaaaaaatttgttataaagccaatcgacaaaaaggcacctgtaagtaatttctttaatattttgtgtattaactgtttaatatctgctagtttcccatgatatcacttgaagaataacagtgttcatttattaaattgcttctgaggaccattctctttccataggtcagctttcccagtgatgaaataatatgttaataaaaatccaaagatttaattttttaaagtaagatgtaaatattagaattttattttatttgagattcagttataaatagataatatttattaggaggctaatgaaaacaccattcctaagaagcaattttaaagtgtttcttcattggtggctagaatgtagtagaggtagccctattctaaattaacttcgtttatacagttttgctttatgaactttgtatttttgtaacttgaagccttgaacttaagaaatctttttatttaaatagatttttaaagttcctctaatgtcaagtatactctagtatcctaaccctgttagttactgaaaaggtaaaagtaagaagaacaggctgggtgcaatggttcaggaccataatcccagcactttgggaggctcgagaggagcagatcacctgagatgaggagttcaagaccagcctggccaacgtggtgaaacttcatctctactgaaaatacaaatattagtcagatgtggtggtgcatgcctgtaatcccagctactagggaggctgagacatgagaatttcttgaacccgggaggcagaggttggagtgcactgagatggcaccactgcactccagcctggatgacagcaagactccgtctcaaaaaaaaaaaagaacaattctaggttaaaaaaaactctacagccatgaacgaagaaccaattttgacattaatggcaaatggtgtataaggaacaggtgctcatagttactttcgagaacaaaaaggaataaatgacatttaatgtattgcaaggataagaatattagcctctttacaaaactggttggatatgaaaaggtgaggaaccagttatgtgaaagtatgtcatgctcactgggagttatgaaattgtatgatttcttatttctaaactatatgtaatatgacattaaaattcatacctcatgttaaaatttagtacagattgttatgagagacagtatccttgaggaagattttaaattcagaatactttatgtttaggattttgtgttttatgcacctcgtctgagaatcaataagcggattttggccttatgtatgggaaaccatgaactatacatgcgaagaaggaagcctgatactattgaagtacaacagatgaaggctcaggctagggaggagaaacatcagaagcagttggaaaggtatggggtttatgacctttcacttttaattgataggagtaggctatctaaaatttaagactgctcagttttttaaatgtaccttaaatttgtatttattaatattttcattatattaaaattcaaagacagtattatcactctgtcctttaaaacgagtatgtataattttcaagttagaaatctttgacacatatctcgaagaaaatagctttttgtgactcatttcttgcttttcactgatagacattgttttagatatagtagtttgaaactttcaaaattgttttgcttgtgacttatatttcttaattttttcagggtaagaatgtgctgaatatttaactttgaaacaatgtcagtgacattgtagaacacaactgaaacgtcactgtgccaagtagggtaacatcagtactccctgccaaagaccctaatctttttaactctgtttctcttagacttaaaaaagaaactgttaaatatattaaattgataatttttaaaattgaatggtagtgaataaaatttatatcaaccctggaatcagattactgggtccagtgacattaatttccaaatctggttttagattaatttcaactttgtgctttacttgaaaaaatttagagaccaaactaaagttaacctttattgaataaatctttatggaacaacgtgatagtctaagaaatagagtaagtccttaaaaaaaatttgaagagccctaaacatatgtattttaaatattggatataaggtactttgtatctagaaggaagccatctgctagataccattttgctactatagttttaggttttatattgaatgattttttttcttattcaacaactgttctgtgtaagagattttattgatttttacctattttgtcatattaactcaaattatcttccttagagaagttaaccacataacaaaacattttttatatgggtttgaagcttgtcagtaattactaatcccatcattaaagatactgagttggtgagctgaggatggtggcatgtgcctgtagtctcagctacttgggaggctgaggcaggaggattgcttgagtacaggagtttgaagacaatcagggcaacaggcaacatgcagtgtagtaaaaccctttctcttaaaaataaaaataaaaaaaagagtaatgagttggattgttactttgatgggctatgtccttttttattgtgctcatgtgctgtagcattacattgtggttctaatcttaaatgctttttaaaaatactctttattgggctttactttctatacagtacattcttatacacatagccttgcatttccctctgtcaaagggaagacttcttttagtttccacttaatttttttaaatcgtcttaaagatttcactgtctcttaaaggttttctagcatgagataaatgaggaattattttatatacagttcctgtatctcatactcatcactctatagtatgcctaactgttctgctcattcataatgttgatatattatttacattctcaacttactatatttatctatatatcctttatttcatggcttatagagaaatactgtattgcttctagtacaggtagtatgtttacttagtatcatttggtaatggtgctatattttagttactctaaggcttagatggaagtggaagacttaagtttcttttttggcacaataatccgtagttctcctggataaatgttagagctcttcattagtaagcatttattgactgctttatactcagttggaattcagtaacttttattcagtttgaatgcctaggagatatattattctagtcacctaggaattggcagtctttcagaaatggcatgctgagtcatttattccctgctttacaggtcagagagagagaaatggcagctgtatgtgtggaaacaattttgattaagcccattggcaaagtagccagcagatatacctgggagaatgcccagaggtatgctgcctgtgctgctagactctcttgggcaagaacagtagttgggaaagagtagcaaagagacctctttccctacaatactttggtatatttggctatatttactccctataatttttataacctaggggttttttggcaatgaaaatgaccttatacactatgagtggttattccatgtagtttttgaagctcttaaattattggcatccaaattgaattatgactgataatttttgcacgtttttgtatggctaaaattgtttccacatgtgaaaactgaaagccccaagtttacagtttagagttacatacctatgtaccaattgtaggttagctgtgggagattctgcaccaaggctggctagtgtcatacaaagaacacaggctttggaactagataaatctgggcttgactcctcttctaacactcaatcgaacagataattttgagcctgtgtttccttgctcttactatgaaaataatattcttaccttcaagcgtttttgtaagaaatcatgacagtggtatacaggcatttagcaaagtacccggtacttaataaaaaatagccattataataattcctaatattattataaactaagttggatatgtttttaatattcatggaagaaaagtgtaattagacccatttgatctttaaaaagtaagatattctaaagtaattttttgcatattaatacaaggaataatagtttattaatgtgatttatgtccttgaaatagaacaactgcattgaaatgagtgttttcaaacccaaactccaaataaaaatatctgcatctattgttacagtaatcacaaaagacttcatgaggaaagtgggactgaagcttgaaggttagagagagcaagagatacgttcagaagaagaagccaacatagatgaatatgtagagataaaaatatgtgtggtgtgcctatgggccagtgaggtcctctaaaatgaacagcatttaggggagcagcaagatctggtttcataaaggagacaagacaggcctacaaaaactagatatcactgagtaatgtaaagggctgaaggcatttgtattatttgaatgaagtgttggctggagatggctattgtcagggtaggattcttataaaatgtgagatacgagcctcacagagtacagtaaactacaacatgttttaaatattataatcagtttaaatatctgctgtatacttattccatttttcagtaggaagaccattccccaccccctcccaacttgcatatggccagattatcttgattctttttttctgcttccatatctccttcacctccatccctgaagaacaaatgaaacatcaatagggaaaagctaaataaaaccagcacatccatctgcagaaagggccatatatgccagagctgggtctgaaaggctcttagttggtggaatatgatggtagacttctggttgagatctggtttgcagtgtaagtcctcgagaattgtcttgggaccttgggaaaggagggagggaggtagttggcttgggaactgtggcagaactggatgtgattgcatagaggctggggagtgattgggtagtctaatcaacatcctagggtggcagacaacctggcatggacaagaatagcttttggccttactagcaattacttgaaaagtactgtgcttttgcttcttttgctttcacacaaagcgtgatgtttcagctatctaaagaacacagaaaggtcagcagccactgtgggggccaccaggcctttcttttgcccggagagattgggaaacacaaactttcccttaaactcacgtcttctagaagtgtggaagcttgtatctccttaaatctctctgcctgtatatgctttataaattgaaataggataaagagaaagaggtgaatgtcctgcagagtgagcccaaatactggggttaggaatagttactggctcttcctccttgctgttgcgaaagtacctcgtaggcatagggaactccagaacagagatggagcttcccttacatgaatgaccaccaggccctagtttttttgttttctatttgacagggtcttgctcagttgcctgccaggctggggcacagtggcacgatcatagctaactgcaacattgacctcctggacacaagtgatcctcgcaccttagcctcctgagtaaccaggactatgggtacacacaccatgcccggctaattttttattcttatttttagaagagatgaggtctcgctatgttgccctggtcttggactcctaacctcaggtagtcttcccgcctttgcctcacaatgtggtgagccaccatgcccagcctctctagattattaaatggtggaaggattcattaaaccagcagcaaggtgtggtgacccgttatgttttagcttagtgcatgcactaggaggtcaccatcagtgtttgacctcttgctgacttgtgacacctctacctgtttgccccaaaggtaagctctctttctgttttaggggcaaatgggtatctaggagctgcaggaattttaaaatgtaggtttataaataagggcgaaatttttgatagcaaaacttttctgataagtttatcagagactgcaagttgagaaactacagggttttgtgcttgaaattcagaattgacagtaggtggcagtgctctttttgtggaacattaaagcatactcagataaatttcagagatgaaatcataactgatttttaagttattaaagtagtgatttgaatattgattcaacttaagtaaacaatattgtctgataataagagtttccccatgtgacttttattcctctttatatttttgcccctaacatagattctgacccatggtaggctcttggtagatgtttggtgaatgaatttggcagtatttaaaagaaacactctcatcaggcccatggcaggtgcagctaaatgatcaaggcattttttcccactgagctctgatgatattttttaagatcattagccacctactgtcattctaatggaattgtgaagggaggtgaaattgatttgttgtcttgtatctaggcataaatgggtactacccaagaaattaaacttggattaattcatttttaatgattgaaaattgttgccctcccttttatttaagatacatgcctttgtttgctcccttcagtcctttattatttccccagtggaggtctccggttaatctaaagaagatattttcttggggcatggcaactgtgtggttaactcttttggtgctgacatttaatttgttgtcagagttcatcccgtatgcaaatggtaaatctgatttttcccccattaaagtgtgccttataagcatgttctatatgcaggaatatatatttgacagttatactttactagcagttttgtaaactcatcctttgaggatgttcctaaatgtctaagtttttaatattttttaaaaatagtctcagtggtctttattgtgaacccacaataagtaatacattggaacccagcacatgtatgtacgtacatgagtgtatgtatgtcatagtcctgtacttttaactacatatgctattttgaacacaagtgtaatacaatgaaaaccctgttaaaatatttatgttgtcatttcttcttagttgattcagttcttaggtttcacatgaatactatttccaattattattattttatttcagtagtttttggaatataggtggtttttgtttacatgaatgggttctatcattgtgtattctgagattttagtgcacctgtcactcgagcaatgtacactatacccaatatgtggtcttttgtccctcaccccattcccaaccattgcttctcaagtcaccaaagtcgattatattactctgtctttgcatcctcatagcttagctcccacttataagtgagaacatatggcatttgtatgttctgagttacttcacttagaatcatggcctccagcttcatccaagttgctgcaaaagacattattttgttactttttatggcagagtagtattccatcacatgaataatatttttgtgtattaatttgtaacagcaattgcaattccttttaagggcacaattagagaatgaaaagaagaaaagagaaatagcagaaaaggaaaaggaaagaatagaacgtgaaaaggaagagctaatggaacgtctaaaacaaattgaagagcagacaattaaagctcagaaaggtaaaagtttcttttttgaaaatggattaaaaattattattgctctgttgtcagatagtggtattttttttagtactcttaaaccttatttgttatataggacaattgtatatttaattggcaaattaatacttagtggaatcacatcataaacatgtttcactaaggcacattcatttatacagtgctgatgtttctcttaaacatgcagatatttttctttttttagttttttgttttaaacatgcaaatatttttcatatgtattcttaaataattgtaaatgtatatatgggctttataaacaaaaaacacatatgcaatacattatggcatttaaagaaaagtatgcaatgctttatggctgtataagtaaggcatttaagtaattaaagtaatttaagctattctgactatatgaacttttttggaactcaattcctaaaaatattttactttattctactagaaaatacacaacacatagacgtgttataacgttttttgtttgtttttggtaatgtgtttggaagaacttacttcttaggcaatatataaccaaagtgctactgtatatagaaaggatatactagatttataatatgtggtttatattaagtaactttaggatataccactttcactcagcgaatagtggagaaagcaagaaaaaaaaagtattgcatcaataaaatgtttttctcctctctaagcagcaggctctcaggggtaacatgaagtctacactctttataaaagctctatttaataatctgctttcttacaattggtaaaacaagctattcagttctgttggaaatagccaacacaggttgaatatcccttgttgaaaatgcttgggaacagaaatattccgattttgggatgtttgcattgtcctattgagcatttcaaatctgaaaatccaaaatcggagctttttttttttttttgagacacagtcttactttgtcatctgtgctggagtacagtggcatgatctcagctcaagctattctcctgcctgagcctcccaagtagctgggattacaggcgtactccaccaggcccagctaatttttgtatttttagtagagagagggtttcgccatgttggccagactggtcttgacctcctgacttcaagtgatccacccgcgtcggcctcctgaagtgctgggattacaggcgtgagccaccatgcccggccctgggcattttctttgaatgccatgttggtgcttaaaaagttttggattttgtagcatttcagatttcacgttttttggattagggatactcagtcttatttaagatatattttgatttcttacaccagcctgctgtggtggagacgtactcttgagcaatgagtagaataattgtaagggagagtagctagaggggaaagccacaaagattgctataaatgcgcaagctgattgatcatttcaattccaagaggattagaaataatacttctaggagaataaatagcaataacctaggctgggtgcggtggctcatgcctgtaatcccagcactttaggaggttgaggcaggaggattgctaaaattcaggagtttaaggctagtctgggcaacatagtgagatcttatctctccgaaaaataaaagtgagctaggtgtggtggcatatgcctgttgtatcagctactcaggaggctgagaggtgggaggatcactccagcctgagcaacagagtgagaccctgtctcaaaaaaaatgaaatatctatatatatagcaccagacctgcattcagttactgtcccagcaaatatcaaagtgaattccatcttcaagaagataaaccacagaaaagagttggtataatgatttcattcattttggatacaccttgtgtgtactaggcacctttctagtagtgagattatagtactggacaaaaagagttcctattctcctggagtttacattttactgggggaagacaaagcaatatattaaataatacaattattttacatagttttaagtgctacaaggaaaggaaacatgataatgttatgaaagcagtagttgtgggtaggaggggagtgtctaatttagatatatattgtttacaattttaaaaagctttacttctgtcattaacctagaatatgactataagcaagtcattttaacatcttaatttccttaggatcctaatttctaaaatggaaataatccctaatttagcattctgagattaaaaagaaaatttctaggtgggttcttttggtgagacaggttctcactctgttgcacaggctggagtgcagtgggtgtgatcaaggtttactgtagcctcaaactcctgggctcaagtgattctcctgcatttggcctcccaaagtgctgggattataggcatgagccattgcacccagccttatagttttattttttaaaaaacaaaaaatttggccaggcgtggtggctcatgcctgtaatcccagtactttgggaggctgaggcgggcagatcacttgaagtcaggagtttaagaccagcctggccaacacggtggagtgtaaatctccaccaaaattacaaaattagcaggtgcctgtaatcccagctactagggaggccgaggcaggagaatcacttgaacccaagaggcagagttggcagtgagccaagactgcactactgcgcttctgcctggatgacagagcgagactctgtctcaaaaaaaaaaaaaaaaaactttgaagtacagatacagtaatatacgtatttctcaagtatgaggctcaatttttacgaagtgaatttactcccataagtgccctgaacatgatagacaaaattatctgccctcacacagtctccttttctctttttcttataacttcaaatgtgatttctgtcattctgacttataccatcatatagagattagttttgtttatcattttctaatagctttgttgagatatagcttataatttacacaccatgtaattacccatttgaagtatacagtttaagggtttttagtatattcacaaagttgtacagctatcatcataataaattttagaacattttcattatcccaaaaagaaatcccatacccattagcggtcactcccatttcttctcagtaccccttctctctgctgtagacaaccacgaatctttctctaaagttttgtctgttctagaccatcatatgaatggaatcatgcaaaatgtggtcttttgtgactggcttcttttgtttaacataatattctaaagtttcgttcatattgtggcatttatcagcactccactctctttttttttttttttttttttttttgagccagaatctcactctgttgccccaggttggagtgcaaatggcgtgatcttggctcactgcaaccttcgcctcccaggttcaggcaattcttctgtctcagcctcctgagtagctgggattacaggcgtccaccaccacacccagctaatttttatatttttagtagagacggggtttcgccatgttggtcaggctggtctcaaactcattttatggatatggtatattttatttatttgtttgaaatctgatgttttttattgtttccactatttgactaaggtgactaatgctgttatgaacattcattgtgtaggtttttgttgttcatatgtcctcatttcttttgggtgtaacctaaggagtggaattgctgggtcatgtggtaactgtatttaactttttgaggaactgccacattggtttctaaagtgactgtaccatattaccctgccaccagcaaatttgatttctccacatttcaccaatacttgttaatgtttgtcttttggattatagtcatcttaatgggtgtgaagtggtattttatagtttttattgcatatctctaatacctggtgacgttgagtgtctttctatgtgctttttggacatttatattgcatgtatttttttttttcctgagacaaggtcttgctcagtcacgcaggctggagtgcagtggcatgatcgcggttcactgcagcctcagtctctgagcttcaagcgattctcatacctcagccttctgagtagctgggattacagatgtgcaccaccacgctcggctaatttttatatttttagtagagacagggttatatacttgttggccaggctggtctccaactcctggcctcaagtgatctgcctgccttggcctcccaaattgctggattacaggcctgagccactgtgcccagacatggatcagtttttattcctgttactagtgtttgaaagtacatttgctctatgtccttatcacttcttccactagtttttattgttagggtttggttttgttagccattctggtgagtatatagtgaatatacaggttgagtatcccttatcttaaatacttggggaccacagtgttttagatttcaggattttggtttttggtttttttctttttttaaaattttggaatatttgcattatacttactggttgagcatccctcattcaaaattccaaaatctgaaatgctgtcagtaagcattccccttgagtgtcatgcaaatgctcaaaaaatttaggattttggagtaatttggagttcagatttttggattaggatactctgtctgtagtttattttcttgattaccagtgatgataaatatttcatgctttacagaccacatggtctctgtcccagctattcagctctgctattgcagtgtgaaagcagctgtgtactataatacctaaacaaatgagggtggctatgttccagtaaaacttaatttaccaaaaaaaaaaaaaagcattggattgggtttgctccatgagccatagtttgctaactcctgtattaactcagttaattggagaggaaacagcagaaaccatttatgggctatatgactgttaaaaagcttccttttttaggagggactggagtagacctgatgttttcagaattcattttaaacattttttaaaacttacacttttatacaattcttaatatatcacaaaatagctattgccttatctgtcatttttcaaattgacctttattacaaaaagctgataaaatgaatattggggaatgtttcaaaatttaactttgtaacccagacttatttctcttttttgtctcataatacagaaacaatttttattatgagagaaaataaagcattgaggtttttggctttttttttttttaatttttttttttttaaattttttgagacaaagtcttgctcttgtcccctaggctggagtgcgattgtgcaatctcgggtcactgcaacctctgcctcccgggttcaagcgattctcctgcctaattacaggtggctgccaccatgtctggctaattttggtatttttattagaaacgaggtttcaccatgttggccagcctgatctcaaactcctgacctcatgtgatccgcccgcctaggcttcccaaagtgctgggattacaggcatgagccaccgtgcccggccagttttttgccgttttaagtaatgtagttcactgatgcaaaatatattgggaatgttgtgcagccatcaccactatccagctacataattattttcatcttgtaaaactaaaactctgcacccattaaacaatccccatttcccccctccccacaacccctggcaaccatcattctactttttgtctttgtgattttgagtattctacctgtataagtggtatcatacagtatttgtctttttgtgactggcttatttcacttaacataatgccctcaaggttcatccacgttgtagcatatgtcagaattgccttcctttaaggctgaatgatattctatttgtataccacattttgcttatctgttgatgggcactcaggttgcttttgtgttttagttattgtgaataatactgttatgaacatggatattcaggtattggtttgagaccctactttcaattctttagttatttgtttgcttgtttagatggaagataaaaccatgagctttgtgggtgttgttttatatatcagtcaatcagatgaaaagaattaattattaaagtttgaggctgggtgcaatagctcacacctgtaatcccagcactttgggaggccaaggcgggtggatcacctgaggtcgggagttcgagaccagcctggcaaaccttgtgaaaccccatctctactaaaaataaaaaaattagctgggtgtggtgacacacgtctgtaatcccagctactccggaggctgaggcaggagaattgcttaaacccaggaggcagaggttgcagtgagctgagatcgtgccactgcactccagcctgggcaacagagtgagactccatctcaaataaaaaaaagaaaaagaaagaaagaaaagtttgataggccagcttgattatctgaattttagaaggcagattctaaaatgagtaatcgtagaatatcgctatggtaacatccagtgccgtatacattttgtctttatagccaaatagccacatagaatttttatattatttattttttattgaggtaaaatatacacatataatacagaatgtacacatctttgcccccccgcccctttttttttttttttttttggagacagagtctcactctgtcgcccaggctggagtgcagtggtgtgatctcggctcactgcaacctccgcctcctgggtttaagtgattctcctgcctcagcctcctgagtagctgaggttacaggcgcccgccaccacacccagctaattttttgtatttttagtagatatgcagttttgccatgttggccaggctggtctcgaactcctgacctgaggtgatctgcccacctcggcctcccaaaagtgctgggagtacaggcatgaaccaccgtgcctggccatttttaccgtttttttttttttttttgagacggagtcttgctctgtcgcccaggctggagtgcagtggcgccatctcggctcactgcaagctccgcctcccgggttcacgccattctcctgcctcagcctcccgagtagctgggactacaggcgcccgctaccacgcccggctaattttttttgtatttttagtagagacggggtttcaccgtgttagccaggatggtctcgatctcctgacctcgtgatccgcccgcctcggcctcccaaagtgctgggattacaggcgtgagccaccgcgcccggcctatttttaccgtttttaagtatacagttcagtagtaataaatacatttctattctttttctcctcccttcaactccccccacccacttcctggcctttgataaccaccagtttatttatctttatgagatttagctctgacatatgagtgaaaacatgcaatagttgtctttctgtgcttggtttatttcacttaacgtgatggcttccagttccatccatattgctgcaaatgacaggatttcatttatttttatggctgaataatattccatagtgtatgtataccacattttctttaagcacttaggttgacttcatgttttggccattgtgaatagtgctgcaataaacgtaggagtacaactatctccaatatattgatttcctttgttttggatattgctggatattgctggatactattgctggatattgctggatactatgttttggatattgctggatactatggtaattccgtagttttagttttttgaggactctatattgttctacatagcggccttactaatttgcattcccaccaacagtgtatgagtgttccttttctctacatccccgccagcatctgttactgccttttttttttttttttttaaaaacagagtcttcctctatcacccaggcaacctccacctcccgggttcaagtgattcttagcctctgccacccaagtaactgggattacatgtgccaccatgcccagctaatttttgtaaatcccaaagtcctgggatttacaggcgtgagccaccttgcccagccttgcctgtctttttgatacaagccattttgactggggtgagatgatatctcattgtggttttgatttatatttctgtgattatagtgatgaacatttttttcatatagcttttggccatttgtacgtcttttgagaaatgtcagttcagatgttttgcccatttgtaaacgagattatttggttttctgctatcgagtttgagctctttatatattctggtttttcgtccttttttagatagacagtttgtagacactttcttctattctttgtttatctcttcactttgttggttgtttcttttgctgtatagagctttttagcttgatgtaacacccattatctctctttgcctgtgcctttgaggtcttacacaaaaaatctttgcctagaccaatgtccttctttcacttctttggttagattgattcctaggtgttttactttttttttttggctatggtaaatggaattgctttcttggtttctttttcagattgtttactgttgttatatataaatagctactgatttttttttttaattttagtttttaagaagagatgatgtctcactctgttgaccagactggtctcaaactcctggcctcaagcggtcttcccacctttcccttcgaaagtgctgggattacaggcgtgagcctaaccaaagcctaaccaaagagtcattcttctccaaccctctcaaaaccttccaagtgttttttttgttttttttttttttttttgagacagagtcttgctccgtcgcccaggctggagtgcagtggtgcaatcttggctcactgcagcctccgcctcctgggttcaagagattcttctgcctcagcctccccaagtagctgagattacaggcgcccatcaccatgcctggctaatttttgtatttttagtagagtcgggatttcaccaggttggccagtctggtctcaaactcctgacctcaaatgatccacccacctcagtcacccaaagtgctgggattacaggcatgagccacaacacctggcctaaaaccttccaagtcttaactgcaattactcaactagttctgatcaagaccaagaaaattaagaacagtaagtaaaagcttgtaagttacagttagctttcaaatttcatgacatatagattttcttagtatacagtaagggaaaataattctttgtaggaccttgtactgtcttactaggtggcattctattgtcttctgtcacagggcttaaataattgtcaaaataatatttaaagttagtactgttaaactctcttaaaaatttattttcctttcctgttcaactcattggaataagaaaagagttgatttagtgatctatgcacctaaggattaaaattcatgttatttatctcccaatattgcttatcttcatgctttaggaatgaatatataccaataactcacatttttcaataattcatataatcacatcaaaattcctattttggggtcagtaaatactgttttcaatcttaatttcttggatttacttattagtttagataagtaaaaccttaatggaagttttgaaatgtattatagatttctgaaacatggcaatttgtttactgaggtcaaaacttcagatggagagattattttttaaaaataaaatagttacgtgcttgtagcctttttacataacttgaattgcagaagattttcatttctctttaaaaattattaggcttttgccaagttggaaacgaggtatagcgcctgtagtcctagctacttgggaggctgaggcgggaggattgctcgagcccatgagttcgaggctgcagtgagcttctgcacttcagcctgggcaacagagcgagaccctgtctcaagaaaacaaagaggtatatatgtatttacatgtgtgctaacttttagaaattgaacagatttgatttcttgctactattttagcttcttttgataatgagaatgattggaattaatcactgttggggggaatacacatatttcatagaactagaagaacagactcgaaaagctctagaactggatcaagaacgaaaacgagcaaaagaagaagcagaacgacttgaaaaggagcgtcgagctgctgaagaggcaaagtctgccatagcaaaacaagctgccgaccagatgaagaatcaggagcagctagtaaggaactgtcttcttagagaaaaaagtttaaataaaagcatagagtgaaccctctaaaaaagaaaaaaagaaaagcaaccattttgtgctttctggagagcaagccaaagataacatgtaacttaataacaaaatgtagacaaaaacctagaaaatttatttctgcctaaacaaaaacctaaaaatacaaaagaataaggcatttttctatagattatttgtaaatggagtctactgtcagcaaaaggttctgattcactttgacattggacaggttcggtaataagtcagttggcgtcttttgctttagataaattaatatgttatagttatataatatagatatatgttatagttatataatatattatagatatataatatgttatagttcctatgaggccataattggttgggtttttttatttagtggacttgcaaataattagatgtaagcgtgtcacttaaaagatcctggatttaaatattagttcacacatgtacttgctatgtatgtgtctttgggtctttctgagcctcagttccctccctttgaaaagaggaatgatggccgggcacagtggctcacgcctgtaatcccagcattttgggaggccgaggcaggtggatcacctgaggtcaggagttcaagaccaccctgaccaacatggcgaaaccctgtctctactaaaaatacaaaattagccaggcacagtggtgcacgcctgtaatcccagctactcgggaggctgaagcaggagtattgcttgaacctggcaggcggaggttgcggtgagctgagattgtgccactgggctccagcctgggtgacagaacgagactctgtctgaaaaaaaaaaaaggaggaatgatactacctgttaatgatactacctgttaggattattggggtattaaatgagatgatttgacaaagtgccatttaaagtatatagcattagataaatattttatcttttgtggactttaacaaatagtttattgatggaaattttttaaaaaagcttttaagttacacattttaagttcctgctactgaaagcaggattaactagtctgtagaataatagtaattttttaattttgtctccttagctcattacctaaaggacttattgtaaataagctatttaagatcttaagaaatactgtatttttttaaatggaaggctaagaaaaacataaacagcctaagcatgtgcattaaaactttgttgacttataagattattcaaaatatgttattttaattttggaattatattgtttactttaggcagcagaacttgctgaattcactgccaagattgcacttctagaggaagccaagaagaaaaaggaagaggaagctactgagtggcaacacaaagtaatcatttattcatttactagcttttattgaatagcttttatacccaggattatgctgactttgtagtgataagtgtaagatactgtcataatttagagtgggaaagatactcgtgttatgtgtattgtaaatatctatctacagatataaaccaagtactttgggaacacagaagaggtgattaatttctgggggaccagagagttgtcgggagacccatatacatttaagctgggtcttgaataatgaattaaattttgggggtacaaaagattgggatgtaaaattgggaatagttagagactgaagaagtagtcattctagacagagggaactgaatgagtataggaagtatgaatgtatataatagatttgaggataaccaataagcagccgaggcttagtgttgttcagaaatgttaggagatgtggccctcaagtttgataatagggaattgtgaaaggctttaaataaatgctctgctacagcaaggcagtgggagtatcgattgacttggggcttagaagatttcaaaacaggattgtaacatgatcagatatgattttataaaaaccatgtagtgatcagtgtgaagaaaggattgggatagtggatacttaagagataaagacccaaactgaggatgtgaaaatgagaataaagaggaatgggaagatataagagacattttgtggtcacaaaaaggcatgggaaccagtgattggatatgaagttgaattatttttatttttttagagacatggtcttactctgtgtcccaggctggagtgcagtggcacaatcataattcattgcagctttgaactcctgggctcaagggatcctcccacctcagcctctgcagtagccgagactacaggcatgcaccatcatttttatttttgttgagaatggaggtcttgctgtgtaacccaggttggtcttgaactgctggcctcaagcagccctcccatctcagcccccaaagtgctgggattgtaggtgtaagccactgtgtgcagctgacaccgagatttctaatatgagtcctaagtagatgaaaccactgttgtctaaagtagcacacaattgtaaaatcaggctttggttggagagtgggggaatataagataatgagagtttaattcaaacaacattaactcttaactgaaaagataatttttttacccccaaagatgatatttagttttagaagatgatttttctacaataaaatgtacttatacagaaaacagttttcttgcactcttaagtaaatctttgtagcagtttaaatttcattgggtaattttatatgtattgaaaattagttatatataaataaaactacaaaaggaatgctactgttaatttcccagttactctacttgtttattagaattttttagatcccttttagggatgatttatgaaatttagagacacataaactttaaaaaattagcatattacagatatcaagtctgtgaattatagaaaattagaaaatgcacacaaaagacaattgtattcccataaactaggggaaatactgcaaaaccttagtacatattcttccaggatacttcctgtttatatattcaacatgaaatcttactgtatgtactatttcattttagtcaattttcatctcagaatattagactatattaagaatttcccaaaaagtctcatagctaatttgccagacaagtgttcagaggactttgcattgtctgtatttgctgtaagtctcttttaatggagggcagtttctctttttattattttgatttattgaagggacctacagaatgtctcacctcctatatttgtttagttacttccttgtgtcattgaccttatcctttaactccagtatttcctttgaaccagaagttagatctagaacctggggaattcaaattaaatgttttgactacagtgcatcaaaggtgagacttccatataattgaacatctaaactggagtacttttgagaaaaagggggtattgttcataattacaccaggacaacagtgtaacaggacttttccaggtaaaccaagataatatgatcacccaaataattggtgatgttagatatttcaggttgtatcatatcagaagacacttaatatctagttaactcaccattagtattttttagtgatcattggatttgagtaacgacagtctcattcctccgttattcggttacattttccccttgtggctcaaataaaatctattgggtgtgagattcttaggcattatatgaatatctatttctcatcaactatttgcacaacagttttagcaaacaattgataatccttgccagaattaatagttctttttttgcatgtatgcttgtttttcttttaatctgtcactttgaagctcacagagtaattctaatagggtttgcataataatgtttttgattttctcttttacctgttgacattcttttatgaaaatagaggtttcataaatagggcctattttcattaccttgaaatacagtttctattaaaaagggagtataacttgattgttttgattattaatttttgaagtaagttgctcataaacgtatttttaatgttcaggcttttgcagcccaggaagacttggaaaagaccaaagaagagttaaaaactgtgatgtctgccccccctccacctccaccaccaccagtcattcctccaacagaaaacgaacatgatgaacacgatgagaataatgctgaagctagtgctgaattatcaaatgaaggggtaatgaaccatagaagcgaggaagaacgtgtaaccgaaacacagaaaaatgagcgtgttaagaagcaacttcaggtatttaaaatttgcagttgtatgtgcatttgaaatatagtttgcattttccccatcttagacaaacttagttaaaaagaatatagaagttttaatactggctgcccttgtgattggtttgtgggtgtttggcctatagtcatgttatttcatttcttccgttgtgtgaacccattagcaaatacctgttagctttgtataatcagaccttaactagtgagttatttaattacagcttgacccattttaaaaggtagaaagtattctaatgtcatgttgaaaaacgtgaatttagtttttgatcagtaatatgtacattgagggccaggcgcagtggctcacacctgtaatcccagcactctgggaggccgaggcaggtggactgcctgaggccaggagttcaagaccagcctggccaacatggtgaaactctgcctctaccaaaaatacaaaaattagccgggtatggtggtatgagcctgtaatcccagttacttgggaggctgaggtattgcttgaacctgggaggtggaggttgcagtgagccgagatcatgccactgcacttcagcctggacaatagtaagtgactctgtctcaaaaaaataaaataaaataaaatgtacattggaaagaatgatagttaatatactatgtttaagacattacataatcttaattatttgttgagattttatattggcaaaaggtcagtatattacatggacataactaggtcaaagtagaggattttaatattatgagctttcttttttcccaataagttatctaatattttaattgttaaaatctttaaatattaaaagaaaatgaggtgatagttacaataaatgtattaagacttttggagaaggcttcccttgaggtatagattttaaatctcatagtaatattagtctgtaatggctacattgaactttttagccatttcaagtattagattagaaagttaaggaaatttagaataatgtacaaaataccatggttgataaatgtggaaaggccatgtgtattcctcccttaccactgccaccactattactaaaacaaacttatacctaaagaaaaaggtttcacagtggaaatgatttggtatatgtatttttgcatcttaaagccattttcataaatttttttaaatctaagaaaaaaataatagttgtactttttattttttaaataggcattaagttcagaattagcccaagccagagatgaaaccaagaaaacacaaaatgatgttcttcatgctgagaatgttaaagcaggccgtgataagtacaagactctgcgacagattcgacaaggcaatacaaagcagcgtatcgatgagtttgaagcaatgtgagagctgttattttgcatatatgttcttcataagctgaaccaccaacagagaaaagcaggcctttgcagatatgatggaatgcatcccaccttgccaaagcacttacaccagtttgactgtgctagctaaaagacaaatttaaggggagctcttcaacattaaggcagtatgatatcatgcttggttttcttttttcttttggtccagggaatggagaatggtgttccattgcctcttttcacattttttttctttttcttttttttttctgttgaagattaacactaattatcacgtctgacaaatgtgtatgtgtggtttcagttctgtgtacattttaaaggataatggtgaacattttaatgggtttcccttgccctttccatatttaacctatttccacattctctctcactcacattttctcagtgtgcccttctcttatctgccatgtccatagccataattccaccatcatacagatcaggcagtgtttaaaatgatggtaggtagcacagtggacagtctttgatcatcatgtagaatatggctatgaatcaggaaagagattagaacatttaataatgtatgtacagctggtgcttagtttttttttaatctaaatttaattaccttattggatatttgatatttggttatttaatcacagtcatctttaacagcttacactgattggtgttttatctcctgtgatcctttgatggctttttttgcctaccatttcacagaggtttagacagcagtagtagctccctaggagagtttactgatgaaacagcctctgcaagattttaaaagttttgttcttttatagactgatttagaaaaacaaatgattagttaaaaaaagaaaatatacatttgttggtaactaatgttattttttaaaacctggaccttttctggaagggcagcatataaaaacatcagtcccgaggaggggacaacaatactacctcactactacatctgtgatgactggttgttcaaacacaatggagtgtgtaaggtatatgttttataattcataaccatagcctcgatcatcaagaaatactttcgaaatttcattttccttcagaatatcttaagagtgctaaatttttaactgcctttttgtcgagtcaaactgtgggattctgatttgtattaaaattgtaagctcctcactggtatactatcatcctggaggggtgttgtatggctgagcaagagagagagagaatgagagagagactgtgtgtgtgtgtgtgtgtgtgtgtgtgtgtactctgtgtgtgtatgagagagagaaatgctaaccttgtagcatgtgaagaatgtctgtaccttgatacgatagttacataatcagtatatttggtttctagatcactgtgcttattttgtttcaatctctgactaaaaatacttaaatttggtttgttaattcttattttagaaattataattttagtttatattaatttcggttatagcttactgaagaaatctttccagttagaaggaggttctaatattcacatgttctaatactttgtttattgtaaaacagctaaatttggagatacgtaaagccttgttttctctgtgtggttcagctactttccatttggtattacacagtcaaatttacatttatctattaaaattgccattttattaaacattttcatgcacagtagattcaagttgtgtctgaaaatatctcttgtgcttttttgattttgctgactttaaaaggattaatctgggcagacattatgtaaaagaaaggttgcgtttaatatattttttgaactttgtaggacaaaacatagctggttaaccttgaagtgactgttgtaccatggttgtgcacatgcttcagaatcctatggaagagaatattcctacttgcagtacatcaaaggaatggatggtggaccctactattcatgttttgagacataaatgttcactttaaagcaattgcataatagataaaaacctgaactttcattggatttttgttaattttcctcattttgaattatgtgcactaccatagctacatcagtttgatacagtattgaaaaattatcagttatattttgctgtttatgatctatttgtagattaggattaaaatggatttaatccatttttaaggctgtgtgaatttttctaaacaagaaccatttgcaatatggatttcttagagattaaaccaattataacttattagcagtcgcgagcacatgttcatatagtcaatgtaaaaatacactaatgagtatttggtaaatcccagtaggcttttaccattagcataattttgtgttgtacaattaagttacaattacatctctaattttggataatattcattggttaacaataaagtgacaaaagctcatgccttcaaggtccactgttgttatttaacatggattttttgtatgtttcttgaaaattacaatctttatcacagccatgaatcaccacaacttaaaagtaagaagtagataggaaataattttaaatcctcatagatctactctttccccgatacctctttggtatggaagtaatagtgattaattctgtggaaaagttaaattattaaattaaattgactttgttgacaacaaaacgtaatttagggtttccagtcattgcctttattgtatagtggttagtttctttttcctgaggaagatacagtttcttgtcattgattgatctcactattaacatttcaacattctttaaagaactgtatgctaagtatatttatgtaagtacatgttcttattttgaagctgtattatagaacagttactataaatctagaaattgcctttttcaagtcttcttactaatttttaacttaaataagtgataaatctataaaaatagtaaaagctagatttttttgttgatagtaatatttaactgtcactttattatttctgttctcaaggacacatagtgatttttttactctgatcctgtcagaaaatggaattttaaataatattttgctttatgtctaattagagttttaagaactggaatggccccttataaagttatgttagattttattggaagtcactcttatcattagaagtgtttcaatattattgtgtttttttttaaaatcccactgtattctgtcccagtattgatcaccgtgttgattattaatgtttttagaaatgaaaataattttttaaattcacaggcatcccattttacatatgcacaataaaaacaattagtcttaaaagttaaagctggaaactaaagtctaagggattactaactttagcattaacatactgaactaatgagtaaaccaaagcttagataccattagtaagaataagagaaaacagttcagtgtggagctgtactgttaggttcctctcttaagtctgttctaaatgaacagaactttagcattttcttagtttgtaccacttccatttttttaacctatcaaatattctaatgtggtctgtcagatggaatgacagtattctagctcatacaaaagctctttggattctgcaaatgtgtttgataactttatgaaatattcaggcagcctgaccccccacagtctacggtagtaactaggaaaagctggctcacaatcatgttccatatgttaaagattaacacattcttatccttagcttttccagttaaataattttaactcccaatttttccttagtagacctacttcttactatgtccatgtatcaagatataagaactaccattttctctgtggaaagatcatggctgtatggttcagctactttccatttgggtagtagacactcagatttacatttatctgttaaaattgccatttatttcatcaatactttgatttcccttaacctctgtgatacaagagttttctgatttggggttatatggactactttaggagttgaagtatttcctacacaatttttacatgaaagatcttgactaaggtgataccccatgacacatcctttgcattcaggtttatgttttggctgtggagatccctaactacttgatggctccgggttcttatttaatggtcgtcatttagccaatacatttttattaagagctggctatattcaaggacttagaagcaagattaggatgattgtgaccctttgttttggcctatataggggacttcaaatattaacttatcttagccttagatcatttgcatttatctattacaatatcatttcttttaaaatggcaatgccatattgttgattcctgttatttgtatgcccagattcctccatgtttgtagctagctagttgcttctatcagtgcaacttatttttaccaccctattctaattgttcttcacttttatttaatcattattttaaatatttggattcatttttatatttatgcatgccatttagtttgctcctaaaaatagtgatactggttttagttttttacttactaaatcagtatagccaaatgtccatcttcctagtggtaatatgcgatcagaatttctgagattatttatgtgactatttttggaaaagtttcttttgataaaacatggatttattatatgaaattcttcttgcactgtattacaatatatgctatgatatcccttttatttttttcaacttaaatatgatgttttatattgttttagacttacgaatcgtgtttttcagaatcataagggaatatctatctcctccctcactttccttttatatatattgaaaagtctatgaaattcaagtctagcatttgaattctctatgctatcattgcatttacctaattatttacttttaaattttagctattttcataaaaacagttttgagatgaaggaaacttacacaataaaaggaagatcaataagcaggaaaattagtaactgacagggaatatgaatgaatactcagtatacgtttcggtatgcttgttttctgataaattacttaattttcatttcataggccaaattttaaacaccagttaataaagttatcctaaaagagtctctaatttgaaaagtttttctaacctaggaagactcattttagacccaactgaccagtcaaatatgagtaatttataatatctgtattaaatattgagaagattaataaagttaaaagtttacagttgaatctttttttatcatggtaaaatatacataaaattgatcattttaaccattttttaagtgtacagttcagtgccattaagtacattcacattgttgtgtaaccatcaccaccatccatctccaggatgttctcatcttcccggactgaagcctgtacccattaaatggtaatgccccattccccctcctccccagtccttggtgaccactgttctactttctgtctctataaatttgatgtttctcagtacctcataaaagtgaactcatacaatatttgtcctttcgtgtctggtttatttcacttagcatgtttgcaaggttcatttattttgtggtatgtatcagaattttattcctttttaaggctaagcaatattccattgtatgcatataccatattttatccatttatctgttattgatggacgcttaaattaccgctatcatttgactactctgaatattgctgctttgaacattggtgtacaaatatcttagagtccctgctttcagttctttggggtacatacccagaaatggaattgtttggtcatatgttaattctgtgtttaatttttttttttttttttttgagatggagttttgctcttgttgcccaggctggagtgcagtgatgcgattttggctcactgcaacctgtgcctcctgggttcaagcgattgtcctgcctcagccttccgagtagctaggattacaggcatgcatcaccatgccctgctaattttgtatttttttcttcttctttttttttttagtagagacaggatttctccatgttggttaggctggtcttgaactcctaacctcaggtgatctgcccgccttggcctcccaaagtgctgggattacaggcgtcagccatcgcacctggccctgtgtttaatattttgaggaattgtcgtaatattttccacagcagcagcaccattttatattcacatagcggtgcacaaggttctaattttgccacatcctcactaacaattgttattttctgggttttttgtttgtttgcttatttgcttgcttgcttgatttcgatgatagccatcctaatggtgaagcagtacctcattgtggttttgacttgcattttcctttgatacatttctcaaatcataaaagaagttagacttttttcatgtgtttattggccatttatatatcatttttggagaaatgtctattcaagttctgcccatttttaaaattgtttatttttctgttgtaggaattctttatatttgggattcaaaatattaatccattatcccagatttggaatattccttttcggatatgagttccaaatcttttttcccattgtgaattgcctttttgcccttgatatagtgtagttttctttgatgcacaaaagtttttaattttgatgaagtccaattttgttgttgttgcctgtgcttttggtgtttgtgtttttttgaagaggaaaaatagtttttaatgaagaaggtgttacaaaaaggcacggcagaagagagaatacgtatatggttagtctctagactgtagaaatgaaagtaaatagatagaaaatgtgagccagtgtgcattgactgtaggatgataaagctggagtggtttgggcccaggaatttatggagccttgaatcctatgtttagatgttttaatttgatttgaggacaactggtagctttgggaaggcacagctacagaagggaacaataactaaaccttgcttgaaaaagaaaactcatgttgtgatgtaaagtatactagaaagtgcagaggagatatcataatagaagagctatgtctactgtagttagcctaagaaaggccgtggccatggaatgaatttaaaggaaattctgataaaggaaatgtctaagtgtaatttgctctcatgtttgctatattgttcatgtttgtggtaatgtattttcttctgaacttattttccagccgacctcttttgagacacttaaaagctcagtttcttttcttttatccatgactttttgggaatgggttctttagtggcacaatagaagtagaaattaaagacatgcaagaacaaatggatttggttctgggttctaattccaagtcttatgctctcgtactctagcttttataactgattttatagttctgaatcagattgtcctttttcagagcatttctctggattcagattatggacacttccattctagatccattatcttcacaaaaatgtatgcctaaccgaggcttaatatctgtgtatgtttgaattattaatactggtttatagttgaaaactattaacctcagaataatgcttataacaatagtttatcagacttctttttgctctcagatgaccgtcataatgtactggcttttagaagaaattcgaagggttttgtttttttgttttttttttttaatatatatatataaacagtttggggttagaaaaataactctttcagctcattatgacaggattatgttcaccaaaacataactcagagattatctcagaatatacaggcacaattatttcctggctgtgacaactctaaacaactcactttggaaatttctttagatttctttcttttctttttttttgttttttgagatggagtttcactcttgttgcccaggctggagtgcaatggcgctatctcggctcaccacaacctcggcctcctgggttcaagcaattctcatgcctggctgatttttctattagtagagatggggtttctccattctccatgttggtcaggctggtctcaaattcctgacctcaggtgatctgcccacctcggcctccgaaagtgctgggattacaggcgtgagccactgctcccagcctagattttttaaaagtcaaaaactgtagttgattatgctcatcaatttagattttgctagaggtacccaaatgacatcttagatttttttttctttcttacttttgattgtttctctcagacaattcctaatacaatctagttctcaatttttaggccataaaggttttcaaatacaggtagataaaatcttttgatagaatctaagttacaggtagatggtttcttctcaggaactttattttatttatttttttgagacagagtctttctctgttgcccagactggagtgcagtggtgcgattttggtgcactgcaactttcacctctcggttcaagcgattctcctgccttagcttcccaagtagctgggactaagggtgtgtgccaccatgcctggctaatttttttgttttttattattattttttgagatggagtctcgctctgtcgcccaggctggagtgcagtggcgcaatctccgctcactgcaagctccacctcccgggttcacgccattcttctgcctcagcctccctgagcagctgggaccacaggcgcccaccaccacgcctggctaattttttgtatttttagtagagacggggtttcaccatgctggccaggctggttttgacctcctgacctcaagtgattggtccccctcggcctctcaaagttctgggattacaggtgtgagccaccgtgcccagcctaaaatttgtgtatttttaaagcatttgctgttgaaggacatataatcgttcattgtatgtaaaagtaaataatagtttactttttaatcccattaatatttgcaaatgtacttgatagtagctcacttgggtttcttaaaacctttaggttggttaaactgcttgtcatttttcaagaaatattaacatcttttaaaagtagtcgtttttgttgataggtacaatataaatccctgtccattcattcattcattcattcatttatttgagttgggagtctggctctgtcgcccaggctggatggagtgcagtggagcgatctcggctcactgcaacctccacctcccgggttcacgccattctcatgcctcagcctcccaagtagctgggactacaggcgtccgccaccatgcctggctaagtttttgtatttttagtagagacgaggttttaccgtgttagccgggatggtctcgatttcctgaccttatgatccacctgccttggcctcccaaagtgctgggattacaggtgtcagccaccatgcccggtccatttagtaatttatatgcattcttaaaataagctgagataatacttccattttgtaaaatgttcgtaccagacaatataagacctggaattagaatccagaacctaatcctctggatatagtttaatgtacttttaaggatatttaaaatgaatttggggggcataagctgtataaaaggctttgtatgaaatgtatcctttggaaaagtaggtttgcatctttacaggaggttaaggtatgtaaatttttggaatgttttcaagcattgggaagactgtgcgagtaagtatgtcttctagataactagtgagatgtatacagataggaaaatgttgtctgccacctcttatttttcaaccattatgctttagctcttaaaaattagatatttaaaatatttttggtttaatagtactattaaaggaatgctgaattaggagaaaagaaggcatgatgtttattcccttttccatgaaataagacatatatagacataatatacatttgcattcagaatcatttaatcagtgattttcagagcaattgctgtttgtgcactgttggaattatgggagatagatgaatagatgagactttgcaactctgccaagaaaattgtggttaatcggggagttgagtcctggactcaaattgaggtatagaaagtatggtagttaagtgccagaagaaaaactgagataaaatgtgcaggagatacagaaatgagaggccacttagttcaactttaggtcactttgattcagtgtttattcatgtgatatttcttgatgaagctaaggaaatgttctttgattttagagcttaggttttagatattgttcttgtgcctataaactttgatcttcgtgtgtgtgtgtgtgtgtgtgtgtgtgtgtgtgtgtgtgtgtgttttggagacagggtcttgctctgttgcccaggctggagaacagtggtgcactcttggctcactgcagcttccacctcctgggttcaagcgatccttctgcctcagccacctgaatagctgggagcacaggcatgtgccaccacacctggctaatttttgtatttttagtagagatggggtttcaccatgttggccagcctggtctcaaacttctggcctcaagtgatctgcccacctcagcctcccaaagtgctgggattacaggcatgagctaccacacccagcctgatcttagttcttaaatgattttcttgcaccacaagtattttggggggggtacagcctaggatttgtctcaaaagtactaatgatagttcatgttaataacatagaagaaacatcagtcttagtaatttgtgatttccctctccccattccttttccccaagagtcacattacgttcttcatttgtgtaccagagagattcagaagggcttagcctgtaatggtcaccatcttgccattgctgttttagccagtcgctgccactgaggtctgatcctgacacctgtctctgcatggtttttctaggcatgcttagaaactgtcaggagtcaaaatatagactctgtagcctatggttatccccaaattaggggtatagggatcctgtaccaaatttccctgctttttcaacaaactttttttttttttttttttttacagaggctgtttagatccaggttttatcagttcacagcacattagatacatagtctgacaggcattaagagaatctctggggccaggcgtggtggctcacgcctgtaatcccagcactttgggaggccaaggtgggtggatcacctgaggtcaggagttcgagaccagcctggccaacatggtggaaccctgctctactaaaaatacaaaaattagccaaatgtggtggcagctgcttataatcccagctactcaggaggctgaggcaggagaatcgcttgaacccaggaggtggaggttgcagtgagccgagtgcagtttgggtgacaagagcaaaactctgtctcaaaaaaaataagagaaatctttgggatagctgtgaggcaccatgatgttgaggtaattgcatgggttttagattcccacctcgggtttgaatcttggcctggccacttctgagaccttgggaatccacttggccatttgagcctgagttgtctcatcaaacagaagtaacactattaatcttgtgagtgttgattgtaataataaacatgaaatactttgtttacagccttggcatattggaaatgttaataaatagtaacttctgtcattttagttttcatccttttgtattatgaatattcatatttgtagccaagtcctttgggttccattttttaatatgttttgtttaccttttaaggattctagttatgattctcttagaaggtatcactccccatgtttgttgagtgtgtgccaggcctatacaaagcatatggagataagaaagacatgctcctaagcagtaaatagtttatggttttctcccggtacacaaaatacataatttatatgtgtttgtgtgttatgaataagtgaggttccttcctcaaccccttcatattatagtgtgccaagtctcagtccttctgtctacatttggatctcttagtgaccttatccagtgtcattgctttaaataccacctgtagactgaaaaacttaaatctctaaccaaattctcccctgaacttcagatgtatatatttaactctctacataacatttccagtttgatatctaataagcatctcaaacttatgttaaactcaagatcttccctccttaaacttgctcctgcctcagtcttccccttctcagttgatgaatggtaagtcccttcttccagctaattaggcaaaaccttgaccacatctatgactctctcataatctccatccagtccaatcataattctgttggcccagcattcaagatacataatgtatccagaatgtgaccacctcatcctccacagccatcagtgttccacccacaggattgcctggatgattgcaaaagacttccattctgttttcttgatttcctgtttgccattttacagtcttttaagatcttacaacaggtaagtcagaccatgtcacttgtgctcaaaatccttcggaggtttcccatctctgagtaaaagccatgttcttttcagcggtcatttgcagcctaatctattctggtccctgccgaagctcttgggcctcctctgctgatttcctcttctcttgttaaattgaagtcacactggcttccttgttattctttaaagcagccagctggtccaactcctcttactcagcttggaagacactttcccagatattgttatgattcactcccttgccacctccaggaatttgcttaaatgccacctcaatgaggccgccttttacaaccctatttaaaattgtaccttcctcaagtatctggtacccatttcttgcctttatttttctctgtagcacttaccatctagcatactatatatttacctatttgtattgtatctatctcaccccactagaatgtaagctccatgagggcaggaattttactgttgtgtacactggtatatgcccagggcctagagcagtgcctggaatgccatagatgctcctatttaataaacgaatggatagatgagctctgagagctcagaaggaaggcacctgatcttactgcagagctccagggaaggcttcctgtgggagatgatccctaagccaagtctttcaggatgagttactcttaatcgaggaggcaaagataggaaagtttctggaaagaagtaactgcatatgcaaatatatcgagtcacagaaggatgtggagtgtgtgctgggactgcccatttgtattgaaaacgtaaagtttgggattcagaaggtagtaccgtgaaatactagaaaatcatgagggagggcaggtttgggtgtgcctgtgacatttctttttggacaatttgagtttggaatgctgatggaatgtcagatgaaatttcccaaggggaaagtgtaaggaaagaattggtgggtttagtataggaccttggagagtgccaacatgaagtactgccaaagcaagagaggaccccacagatgtgtaggacagaaaggtgactgcatgtgaccaccagtgccacatggggaaaaaaatctattacgatgtttaaaatgtaaactggtttcagcaacaagaacatcattgaaaagagcaatttctttgagttagagtagttgtcacttaactgtgtgtcttctgcaaagtgttttccccaaatctacacataattcttatgctccaagaataacaagaacaagaaaatgctgtctctaacagtgtcctctgtcagctccatatgtctaaatctgacacgttggcatgagccccactccatacccctgctcaagtcactgagattatgcctagtaaagtgaaaatctgttcccgtatttgccatctatagtaaataggctccacgaagcacttgagtgatgtcatccattcaaataatgttattcattcattaaacatttattagatgcctcaagttaggctctgaggattcataaataatttaatacatcatcataaataatttaaaacatctagaggaagaaacagaagagttaaataattatgacaatgagacgagtaacaagaggcactcagagctaggtagtgaccaacctcttgctaacagtgacaaggttatagaggttattgtaattgtcagcagtcgcctcaggaacaagtaccatctccctaccccttgcctttagggccgagggcgtatctcagtggatgttcagtgcagtagtggtcttgatgctgattcacagaggagtttcagaatctatcatgctttaggagtaatttccagcactagagccaacggtatccgctgtatgagtagagggtgaggaggtctggtagcatgtcttgggctgtcggttaggaaagtctgtttatatcttgcgctgctctcctcaggagaggttaagatgtactttgtgtacgttctggagctgctaaggacttctggtgggaggagtccttccatttattcatccaaatatgttagcgcttgacaggcgctgtgtactagtcattcagaatatcatagtagccaagtccctgccctaatgaactgacttccagtaggaaaacacaaacactggaaaacagaataattaatacaaattgtattactaggttgaatcatgtgcagttactgatatttaaccatccccgacctgtaaaaacagcaattttatatccacttacaactatgaaataagggactgagttagaagaaaatgtaatcaaggacaggaggtaagaaaaagtctctgaggaagtggcatgtaagttgctacctgaaggaggaaaaggctagctcctcttgttcctctgtttaaatcaagatggtagatgcaaatgccagacagatgaaaagagtgcactgggcctgatggggactgtgtctcgtcaggagtctcctgctctgtccaaagagtgaggaagagggagggcatcagccctttacatatggggtaggtaggccctgtgttgctataccttgtgatcttccaagataagctagaaaatggcttttagaggaaaaacattcaaatatactatatttgagttgaaatgtaatttttatgtgaagtctttcagattatacatgtcagctatttcagtgcagtggtttacacctgtaatcccagcaatttgggaggctgaggtgggaggattgcttgagtccaggagctcaagaccagcctgggcaacatagcaagatctcaactctacaaaaattaaaaataaaattagggcccagtgtggtggctcacacttgtgatcccagcactttgggaggctgaggtgagaggatcacttgacgccaggaatgtgagaccagtctgggcgacatagtgagacctcctctctatttaaaaaaaaaaaaaaagaaaaaaaattggtgtggtagcgcacctgtagtctcagctacttgggaggctgaggtgggaggatcacttgagcccaggaggttgaggctgcagtaagctgtgtttgcgccactgcactccagcctgagcaacagagcaagaccctgtttcaaaaaaaaaaaaattagaaaaagtttggcaagccaaactagatacacctgcttgccagaagtagcccactggacaccaatttacagccttgctttaaaattccaggtagaaggaacaacatatgcaaatactttgaggcaagaaagagcttcacttgttcatggaaaagacagaaaggcggtatgtccagagccaggtgaccccggaggagagtgatgtgtgagaggaagttgaggaacagccagatcacaggagcttcctaagccatggtgagaagcctacaagatctaggccaatgtccactgagcagtttggccctgtaggacaaaaacattgctaccagaatcgagctaagcaaaggtaaattcaagagaagtttgaggaacagaggtgcagggatggaagtgtcagtgtagtttgtattcttctcaacaaactgtaccctggggctaaatggctgcatctgcctgagcaaggggcactattcccttatccacacaaagacatcataaaggctgcaggtgtccttgaaggtattccattttatagctaggtaacctgccgaaggacaaccacagtggcaaactccgcatttggattttggttttcttagaagcgaaagcccttatcttttttattacaaaatgtgacctttccagtttaaagccaactgagacatgtttacttgctcttggaaggattattttgtctgcataactcaaagtgaatgtattgattgacttataggccaaagaagactgctttaaatcttaagttcgacttgaatacagagtggtagtgacctgatcaaacccaccagattgaagaccaacctccttgaaccactgcatgtgggcttgtaactctagtctgtccagtttagtgctcctgttttcaagatgaggtcaatatagcttaaagatttaaagttgaaatatatgatttactcttgtaggggagggaaagcattattattattttatttatttatttatttatttatttatttatttatttatttattttttgagatggagtctcgctctgttgcccaggctggagttcagtggcacgatctcagctcactgcaacctctgcctcccgggttcatgccattctcctgcctcagcctcctgagtagctgggactacaggcgcccacccatcacgcccggccaatgttttgtattttttaagtagaggcagggtttcaccatgttagccaggattgtctcgatctcctgacctcgtgatccgcccacctcggccttccaaagtgctgggatcacaggcataagccactgcacccagccgaaagcattatatatatatatatatatattttttttttttttgttaggtctcctaaatgttttttttatttttttcattttttttttattatactttaagttttagggtacaagtgcacattgtgcaggttagttacatatgtatacatgtgccatgctggtgcgctgcacccactaacttgtcatctagcattaggtatatctcccgatgctatccctgccccctccccccaccccacaacagtccccagagtgtgatattccccttcctgtgtccatgtgatctcattgttcaattcccacctatgagtgagaatatgtggtgtttggttttttgttcttgcgatagtttactgagaatgatgatttccaatttcatccatgtccctacaaaggacatgaactcatcattttttatggctgcatagtattccatggtgtatatgtgccacattttcttaatccagtctatcattgttggacatttgggttggttccaagtctttgctattgtgaataatgctgcaataaacatacgtgtgcatgtgtctttatagcagcatgatttatagtcctttgggtatatacccagtaatgggatggctgggtcaaatggtatttccaattctagatccctgaggaatcgccacactgacttccacaatggttgaactagtttacagtcccaccaacagtgtaaaagtgttcctatttctccacatcctctccagcacctgttgtttcctgactttttaatgattgccattctaactggtgtgagatggtatctcattgtggttttgatttgcatttctctgatggccagtgatgatgagcattttttcatgtgttttttggctgcataaatgtcttcttttgagaagtgtctgttcacgtccttctcccactttttgatggggttgtttgtttttttcttgtaaatttgtttgagttcattgtagattctggatattagccctttgtcagatgagtaggttgcgaaaattttctcccattttgtaggttgcctgttcactctgatggtagtttcttttgctgtgcagaagctctttagtttaattagatcccatttgtcaattttgtcttttgttgccattgcttttggtgttttagacatgaagtccttgcccatgcctatgtcctgaatggtaatgcctaggttttcttctagagtttttatggttttaggtctaacgtttaagtctttaatccatcttgaattgatttttgtataaggtgtaaggaagggatccagtttcagctttctacatatggctagccagttttcccagcaccatttattaaatagggaatcctttccccattgcttgtttttctcaggtttgtcaaagatcagatagttgtagatatgcggcgttatttctgagggctctgttctgttccattgatctatatctctgttttggtaccagtaccatgctgttttggttactgtagccttgtagtatagtttgaagtcaggtagtgtgatgcctccagctttgttcttttggcttaggattgacttggcgatgcgggctcttttttggttccatatgaactttaaagtagttttttccaattctgtgaagaaagtcattggtagcttgatggggatggcattgaatctgtaaattaccttgggcagtatggccattttcacaatattgattcttcctacccatgagcatggaatgttcttccatttgtttgtatcctcttttatttccttgagcagtggtttgtagttctccttgaagaggtccttcacatcccttgtaagttggattcctaggtattttattttctttgaagcaattgtgaatgggagttcactcatgatttggctctctgtttgtctgttgttggtgtataagaatgcttgtgatttttgtactacattgattttgtatcctgagactttgctgaagttgcttatcagcttaaggagatttggggctgagacaatggggttttctagatatacaatcatgttgtctgcaaacagggacaatttgacttcctcttttcctaattgaataccctttatttccttctcctgcctaattgccctggccagaacttccaacactatgttgaataggagtggtgagagagggcatccctgtcttgtgccagttttcaaagggaatgcttccagtttttgcccattcagtatgatattggctgtgggtttgtcatagatagctcttattattttgaaatacatcccatcaatacctaatttattgagagtttttagcatgaagcgttgttgaattttgtcaaaggctttttctgcatctattgagataatcatgtggtttttgtctttggctctgtttatatgctggattacatttattgatttgcgtatattgaaccagctttgcatcccagggatgaagcccacttgatcatggtggataagctttttgatgtgctgctggattcgttttgccagtattttattgaggatttttgcatcaatgttcatcaaggatattggtctaaaattctcttttttggttgtgtctctgcccggctttggtatcagaatgatgctggcctcataaaatgagttagggaggattccctctttttctattgattggaatagtttcagaaggaatggtaccagttcctccttgtacctctggtagaattcggctgtgaatccatctggtcctggactctttttggttggtaagctattgattattgccacaatttcagctcctgttattggtctattcagagattcaacttcttcctggtttagtcttgggagaatgtatgtgtccaggaatttatccatttcttccagattttctattttatttgcatagaggtgtttgtagtattctctgatggtagtttgtatttctgtgggatcggtggtgatatcccctttatcattttttattgcgtctatttgattcttctctctttttttctttattagtcttgctagcggtctatcaattttgttgatcctttcaaaaaaccagctcctggattcattaattttttgaagggttttttgtgtctctatttccttcagttctgctctgattttagttatttcttgccttctgctagcttttgaatgtgtttgctcttgcttttctagttgttttaattgtgatgttagggtgtcaattttggatctttcctgctttctcttgtgggcatttagtgctataaatttccctctacacactgctttgaatgcgtctcacagattctggtatgttgtgtctttgttctcgttggtttcaaagaacatctttatttctgccttcatttcgttatgtacccagtagtcattcaggagcaggttgttcagtttccatgtagttgagtggttttgagtgagattcttaatcctgagttctagtttgattgcactgtggtctgagagatagtttgttataatttctgttcttttacatttgctgaggagagctttacttcccagtatgtggtcaattttggaataggtgtggtgtggtgctgaaaaaaaagtatattctgttgatttggggtggagagttctgtagatgtctattaggtctgcttggtgcagagctgagttcaattcctgggtatccttgttgactttctgtctcgttgatctgtctaatgttgacagtggggtgttaaagtctcccattattaatgtgtgggagtctaagtctctttgtaggtcactcacgacttgctttatgaatcttggtgctcctgtattgggtgcatatatatttaggatagttagctcttcttgctgaattgatccctttactattatgtaatggccttgtctcttttgatctttgttggtttaaagtctgttttatcagagactaggattgcaacccctgcctttttttgttttccattggcttggtagatcttcatccttttattttgagcctatgtgtgtctctgcacatgagttgggtttcctggatacagcacactgatgggtcttgactctttatccaatttgccagtctgtgtcttttaattggatcatttagtccatttacatttaaagtgaatattgttatgtgtgaatttgatcctgtcattatgatgttagctggttattttgctcgttagttgatgcagtttcttcctagtgtctcgatggtctttacattttggcatgattttgcaatggctggtactggttgttcctttccatgtttagtgcttccttcaggagctcttgtaaggcaggcctggtggtgacaaaatctctcagcatttgcttgtccgtaaagtattttatttctccttcacttatgaagcttaatttggctggatatgaaattctgggttgaaaattcttttctttaagaatgttgaatattggcccccactctcttctggcttgtagggtttctgccgagagatccgctgttagtctgatgggcttccctttgagggtaacccgacctttctctctggctgcccttaacattttttccttcatttcagctttggtgaatctgacaattatgtgtcttggagttgctcttctcgaggagtatctttgtggtgttctctgtatttcctgaatctgaatgttggcctgccttgctagattggggaagttctcctggataatatcctgcagagtgttttccaacttggttccattctccccatcactttcaggtacaccaatcagatgtagatttggtcttttcacatagtcccatatttcttggaggctttgctcatttctttttattctttttttctctaaacttcccttctcgcttcatttcattcatttcatcttccatggctgataccctttcttccagttgattgcatcggctcctgaggcttctgcattcttcacgtagttctcgagccttggttttcagctccatcagctcctttaagcacttctctgtattggttattctagttatacattcttctaaatttttttcaaagttttcaacttctttgcctttggtttgaatgtcctcccgtagctcagagtaatttgatcgtctgaagccttcttctctcagctcgtcaaagtcattctccatccagctttgttccgttgctggtgaggaactgcgttcctttggaggaggagaggcactctgctttttagagtttccagtttttctgttctgttttttccccatctttgcggttttatctacttttggtctttgatgatggtgatgtacagatgggtttttggtgtggatgtcctttctgtttgttagttttccttctaacagagaggaccctcagctgcaggtctgttggagtaccctgctgtgtgaggtgtcagtgtgcccctgctggggggtgcctcccagttaggctgctcgggggtcaggggtcagggacccacttgaggaggcagtctgcccgttctcagatctccagctgcgtgctgggagaaccactgctctcttcaaagctgtcagacagggacatttaagtctgcagaggttactgctgtctttttgtttgtctgtgccctgcccccagggtgctgcctacagaggcaggcagtcctccttgagctgtggtgggctccacccagttcgagcttcccggctgctttgtttacctaatcaagcctgggcaatggcgggcgcccctcccccagcctcgctgccgccttgcagtttgatctcagactgctatgctagcaatcagcgagactccgtgggcgtaggaccctccgagccaggtgccggatataatctcgtggtgcgccgttttttaagcccgtcggaaaagcgcagtattcgggtgggagtgacccgattttccaggtgccgtccgtcacccctttctttgactcagaaagggaactccctgacctcttgggcttcccaagtgaggcaatgcctcgccctgcttcagctcgcgcacggtgcgcgcatccactgacctgtgcccactctctggcactccctagtgagatgaacccggtacctcagatggaaatgcagaaatcacccgtcttctgcgtcgctcacgctgggagctgtagaccggagctgttcctattcggccatcttccgcattatattttttaaaagtattactttgagacagagttttgctcttgttgcccaggctagagtgtaatgacgtgatctctgctcaatgcaacctctgcctcctgggttcaaatgattcttctgcctcagcctccggagtagctgtgattacaggtggccgccactacccccaggtaatttttgtatttttatagagaaggggtttcatcatgttggccagggtggtcttgaactcctggcctcaagtgatccgcctgacagcctcccaaagtgttgggattataggcgttaacctccacacctggctatttttttaaattaataaatgattgttaaagccctagaaatcaaagaagagtctgtgctcaagaaatattcaaaatctagaggaaagttgaaattggagaagtgaagatggatgtggatagaaggctttttaagccacccaataggtgttgaataaaataattcaggaactcagtgagcaagtcttcagtgataagaactgaactcagtctggagaaaattcgaggttgaggatcaaagggaagaaggctcttggtgagttttagcatgtagaagagagccagcgaggagggtggccactgtgagagctgaaaaatgaagttatcaggcagcatttgagacaggcttatagtttgagttaacctcccgaataaatgccagaggagaacgctacattcgttttcagaactgaatgagtatttcattgaaatgtaccagtcaattctttgtgcaattctttgtcatttattagaaatttgaagagagaaagcgttagtaacatttttcagatgctctgtgtgggttatttgaatggctttgtagataaaaatagatctgggccgggcatggtggctcatgcctgtaaccccagcactttggtaggccaaggcgggagaccacctgagcccaggagtttgagaccagcctgggcaatatggtgccccgtctctattaaaaaaaaaaaaaaaatctgattcaacttccttatgattctttattagatttttgcctgtgtgtaattaaaatgaaaattgcgttttcaacagaaaattactgtaattatattttgcttttagactagtagattctatcaaattagagcaaatagggcaaatgatctttatgaaaaggcccagatactaaacattttggactttgcaggccagttgtctctgtcccagctatacaactctgctgttgtagtgcataagcagctatatgtaaataatgagcatgtttgtgttcccataaaattttatttatggacacttaactctgaatttcatacaattcatgtgtcacaaaatattcttcctctgatttgtttaaaaaaaaaaggtaaaaaacattcttaaatcacattctgtacaaaaacagatgggaagctgggtttggccaacgagcctcctgagttaaaggtttttaaaaactaatgttctcctaagggccagtgctgtgtctttctgtctggatgactattaatattttgatgtgaccctagggaggtcttattttgttataatgaagggatttcttagatacttgaacaacttttggcagtggttctcacactagcgtgcatcagaatcacttggagggcttgttaaaacacagattgcagggtgccctcctcaggtttcacattcagtagatctatgcagctgctcaagaatgtgcatttatggccaggtgcggtggctcaggcctgtaatcccagcatgttggaaggctgaggcgggcggatcacttgaggccaggagttcgagaccagcctggctaacgtggtgaaacactgtctctaccaaaaatacaaaacttagttgggcatggtagtgcacacctgtaatcctggctactaggggggctgaggcttgagaattggctgaacctcaggaggtggaggttacagtgagctgagatcatgccactgcactccagcctgggcaacagagcgagaccatgccacaaaaaaaataaaataaaataaaataattgcgtgttttaaaggtgagtctgatgctgctgttttgggaccacactttgagaattgctcgtttgggtctcactccaacccaatactgtggaaataacacagttgcttcttttactcagtgtccttagagtaactattgacttctacatagtttctttgagacctttgaaattcgaatggctcaaagaccaaagatatttggaacaaaattcataacttccccatctattgtagtatttttccttcattactttctgtttttaaacacttaaaaactagagattcatttataacagtattagagaatgaaatgcatctagtagaaatataaatgatggaatatatgtatatatattagatactcatgtatcagtttgaaaaatagtatgttgccagtaactggcactgcatgttcctctccatcacgtcatccgtttcttagcttttactatctgtgtttgtatctacaacaatataatgtctagttttgcccacacatgaactttatacaactagttttttttttgtaattcgtgatgaagttctcaaaacataattttattacacacacatgcacatccattttgatgaatatagctgtggttcattttcactgctgtatttattttatgagtgcactacaatttatcagttcccccaatggtggacatttggattgttaccagtatttttttttttttttttttgagatggactctcactctgtcgtccaggctggggtgcaatggcatgatcttggctcactgcaacctctgcctcctgggttcaagcaattctcctgctgcagcctcccaagcagctgggattacggggacccaccaccacacccagctaattttttttatttttagtagagacagggtttcaccattttggccaggctggttttgaactcctgacatcaagtaatccaccagtcttggtctcccaaagtgctgggattacaggcatgagccactgcgtctggctataggattgttacgagtattttttaaaatctttaaacaatatagccacagatatttttgtcttctattcatgttttctagtgaataagcacaacagtatttctacagcagagacctagggaggggagttgtctgtcattatggaatatgcacatcttcaactttactatgtaaccatcaattgtttcctaaagtaaggctatatccacatcttcgccacacttcatatcactaaacttttcaatttctgccgatttgataggtttaagatgacattgtgcttttattaataatttgcattttgttaattactaatataacataatttttctttaaaggcctttcatgtttcattttctttgaaataactttttttttgcctgttttttattagattgtttatcttgatccagttaattcagataatttctttccattgtggttactaatcttttgacatttaaatgttttagagagatttccttccatggcttaccttgtctctttggctttttatggtggtttttttttttttttttttttggataggtaaacgttttacaatttcttgtagcttaatttataaattattctcctcataatttgtggggattttttcttgtgtgtgtcttgttttaagaaattattctctcactttatgtcatgaagatattttcctatattttcatctaaaagtttggttatttttacatttaaatctttagtccagctataaataacttttgtgcatggtatgaagtatggatccaattttattttatttttttgtctagatgactagttgtcttgatactttatttaacagttcatccttttcctattgatcccattgccatttctttcatatttcttcctctgttctgttatactctcatctgttgcattggtcagtgtttctatccctgtgtcaatactattctgtcttaattactacagcctttgctttttaacaagtcttgatatctggttgagctttcttaaaaagttgctacaccttgtttgtaaaataggctcctgactagttttggttctttgttcttctgcataaattcgtgtaacctgtatgggaaaaaatactttggggacttttgcttggaaatgtattaacagattaatttggtaagaaattacagctgtacggccgggcacggtagctcacgcctgtaatcccagcactttgggaggccaaggcaggcagatcacgaggtcaggagatcgagaccagcctgaccaacatggtaaagccccgtctctactacaaatacaaaaattaaccgggcatggtggcgtgtgcctgtaatcgcagctactcgggaggctgaggcaggagaatcgcttgaacccgggaggcggaagttgcagtgagccgagtttgcgccattgcactccagcctgggcaagaagagtgaaactctgtctcaaaaaaaaaaaaaaaaaaaggaaaaaaaaaaaagaaagaaaagtaattacagctgtacaatattaagcattcctaatcatgaatatgcagtgtctttccaccaagtcttccttgatgccattcagtaaagttgtttaaatttttgcattaagatcatgtatttattttgttagatttattattaatcatctttttgctgtcattttcagagttacatttgaaaactatttctggctggtgtagagaatgcagttgatttttttttttttttgctgaccttaaattaaggaaccttgtttcattctcaccgtttctaataatttgtgaagtcttttgggctttctacacagactttcttcattttctgcaaataattatagttttcagtcttctccatccataaaacttttattctgtttcttactgagttgactggctgcaatttccagtcccatgtggaacataagtggtgtctcatttcttttcttgtttgagatggggtctcactctgtcactcaggctggagtgcagtggcgttatcttggctcactgcaccctccatttcccaggctcaagtgatcctcccacctcagccccctgaatagctgggactataggcacatggcaccagcctaatttttagtatatgacttttatcagatttatgaaacttccttttacatacatatacatatttttctaagagttttttctttttaaataaaaagagggttttaaatttattaaacgcaatttctgagtatattgaggtaaccaaccgtgtgtgtgtactttaattttttaatttttaaaacttttttgtagatgatgctactaaaaattttatttaaaaaatttatttttaatttttgtgggcacataagtatatatttatgggggacatgagatattttgatacaagcatgcaatgtgtaataatcacatatggaaaatggggtatccatcccctcaagcttttctcctttgtgttacaaataatctaattatacccttttagttatttttaaatgtacaattaaattattattgattatagtcaccttgtgctgtcaaatactaggtcttattcattctttctactttttttttttttttttttacccattaacaattctcacctcccaacctcctgcttccccactacccttcttaccctctggtaaccatccttttactctctatctccatgagtttaattatttttatttttagatcccacaaatcagtgagaacatacaatttttgtccttctgtgcttggcttatttaacttaacattagccatctccagttccatccatgtagttgcaaatgacaggatctcattattctttatggctgaatagtactccattgtatgcaagtaccacattttctttatccattcatctgttgatggacacttaggttgcttccaaatcttggctattgtgagtagtgttgcagttaatatgggagtgcaggtatctttttgatataatgattttctttttggggggtatatacacagtagtggggttgctggatcatatggtagctccatactgttctctatagtggttgtactaatttacagtctcaccaacagtgtacaaaggttcccttttcttcacatcctcaccagcatttgttattacctgtcttaataggataaaagccatcttaactggggtaagatgattatctcattgcagttttggtttgcatttctctgatgctcaatgatgttgagcaccttttcatatatctgctgccatttgtatgtctttacttttaaaaaaaaaactgttggctgagtgcagcagctcatgcttgtaatcccaggaggattgcttgagcccaggagatcaagaccagcctgggcaacatagtgagacctcatgtcccaccctccccaaccaaaaaaaaaaaaaaaaaagaaagaaaaattagccaggtgtagtgaagcacacatgtggtcccagcttctcgagaggctaaggtgggaggattgcttgtgcctgggatgttgaggcttcagtaaaccatgatcatgtcactgcactccagtttggaggacagagcaaaaccctgtctaaaagaaaaatgttaatatactaaactagacagatttttttttttagatgaagtcttgctctcttgcccaggctggaatgtgagtggcatgatcttggctcactgcagcctctgcctccagggttcaagcgattcctgtctcagcctccagagtagctgggactacaggtgcaggccaccacgctcgggtaatttttgtatttttagtagagatggcgtttccccatgttggccaggctggtctcaaactcctgacctcaggtgatcaacccctggcctcagcctgccaaagtgctgggattacaggtgtgagccatggcctgtactagataaatagattctttaaagtgttaaactaggccgggcgcagtggctcatacctgtaatcccagaactttgggaggccaaggcgggcggattacctaagtcaggagtttgagagcagcctagccaacatggggaaaccttaactctactgaaaacacacacacacacacacacacacacacacacacacacacacacacacacacaaaattagccggatgtggtggcatgtgtctgtaatcccagctacctgggaagctgagacaggaatcgctggaatcctggaggcagaggttgcagtgagccaagacggcgccattgcactccagcctgggtgacagagggagacaacatcttaaaaaataagttcaactaggtttgcgtcccttattatatattctaacacataatttaatatatattcttgctataacttgatatatattctaacccatggcttaccgcttcacaaatcctgagcctcctgtgttgtgaatatccagctcatgtgatttttatgtatctcaccctcactacccttcagttgctgctgccttcagctaaaatactgtcatctaatctcatgccgccacctggtggcaaagcttggaaatttctgacgtctcttcacctttctttccctgttagggaaactcatacatgcagttttctccttcagttctattccctctcttgtgcctttcatctattaactttactcccaaatcctcctttctcatgctctcctaaattttctcattattttcatgaaaaataattctcttcctttgctctctctgctcctttatgagtctaaatctacataaatagtactactagttaatcacagtgagaataatattactagtgactatggaaaaactacagctatacattttgaaatgacatttctttttttttttttttttttttgagacgggagttttgctcttcttgcccaggctggagtgtaatggcccgatcttggctcaccgtaacctccaactcccaggttcaagcgattctcctacctcagcctcctgagtagctgtgattacaggcatgcgccaccatgcgcggttaattttcttatttttagtagagacaggatttctctatgttggtcaggctggtttcgaactcccgacctcaggtgatctctgcctcggcctcccaaagtgctggaattactcagcctgaaatggcatgtcatacaataaagtgccagccagactaaccttcaaagtctttgaaaatagttagaattccctttaaaatgttcttaaatttcaggtactattgaaccatcgaattatttctggccaggttaacatcaagctcaagtattaaagaagaattataaaaccattaataaatgtcattgtttctatgttcctttattacaatctttgacaaatttggagtttctactgtattttactgcaaagactcagcttttcattatgggttaaactgcctagaaacaaaatcactcttcatgacgtggtttccatgggaaacagcccaccacagctgcccttttggttcataactcattcgtaagatagagattgctagtaactgcatttctaattgttttacccacaaggttagaaaatactgtaaccagtattctccccagtcagggaactgactcatggatacgtttggccagtttagcagtttctttgtcaagttaattctgactttgttttatctctaagggatatatcggagaatggcaggtgagtcagctgaggaagacagaccagagagagtagggctgaaattgacctctttaattccggcaatgccaacgtgtctgcagaggaggtagttttcatggtttgtttgtcttaacctatccagtcttttagtaggcaggtactgagaatttgcttattcaaaaacatagcaactattgatttcagagtaggcactataaagtattttggatccattagtctggttgctacctgaaaataactttaacaatgcctcggttaatcaaaagagaacttcacataaaatataaaatctggtagaacacattactgaatgacatgaagttctgatttttatggctttaagacaagacctactattctaaataataggtcttattattgaaagagactagttagcttgtgtagagttgctgcactatttgaagtctagcatctatttaaaaggaaggtttaaagttattcttatttccacattctaatcgtggagtttcaaaggtggactggaaaaaaaaagaggttaaagattaggcagacagtttgacaataacaggccctacataatccaggctgacaagagcgccctgatgttgcaatgtgctgagcaagtagtcagcctgcccattcagcttcctactgtgttcttttgctaaatgctttctaatctcttaatgtctcttttgaaaggtggggacccaaactgtatgcattgttccagatgcgctcttgccaaagcagcataaagcaaatgtaacccttaggaagaaggctccctccctcactaggtaagtacaactggcagccgtggccagggccagctcacctgcccactagacctgccacaccttccactgccaggatgctggtgggacctcataaaatctgaacctgttcatccacaggacctgtggatttcaagtcaaaggaactgaccaagagcaacctctatctttacagcctctgattccatcccttccaggttctttcccaatagtttgcatctcttgggctctttgccaatcaagaacatcatcctccaatttaataattttgaggtgagctagaatttattaaaatgatgttttacctgtaatcttggtgagctgattggacctcctactttaggggattctcttacctttagaaagagccctctctagcattgagaatgaaagtattatggtgcaagttctcttatgacacttctgttctgctgggaggtttttcttctttttaaaaaatccatattcaggcctggtgcggtagctcatgcctataatcccagcactttcagaggtggaggcaggtggatcacctgaggtcaggagttcgagactagcctggccaacatggtgaaaccccgtctctactaaaaatacaaaaaaaattaggagtggtggtgcatgcctgtagtcccagctacttcggaggctaaggcagaagaattgcttgaatccaggaggcacaggttgcagtgagccgagatggcaccactgcactccatcctggatgacagcgagactccgtctcaaaaaaaaaaaaaaagacgtattcagatttacttaaaaatgaagttttgtacatgcacattgagtagaacagtggcccccaacctttttgcaccaaggactggtttcatggaagacaaattttccatgggctgggagtggggttggggggtggaggggatggttttggggtgaaactgttccacctcaaatcatgaggcattagattcccataaaggagcgtgcaacgtggaaccctcgcatgcacaattcacaatagggttcgctcctttgagaatctaatgctgctgctgatctgacaagaggcggcgctcaggccataatgcttgttcaccactcagcttttgctatgccacccagttcctaacaggccacacgccggtactggtcctcggcccagggattggggattcctggagcagaagaattaaagaattggttaataagctaggttaatatagtattatgtactgacctgaatttggtaatatttaaaaatcatttttcaatatgattaccatgataacaggtttttaaattctttttttttttggcagagactatttgactcatcccatttgtgaataaaaccacaacaatgttgtttatgttgtaaatcttgagttcccccaacttgctgattaagcctcccaaagttctctaaacctccttctagctaaaggtcaatatatttgagataatatttaaagatgtagaaccaatgttctttatagaaatattatgttttagacttatttatgtgacaaaaaaatggtcacatgtgttcatttaaggtggggaacttttagaagcaatttgcttctttggccttgaatttggcctgccctgaaatgagtttaaggtcgtgcaagattctctctgatatttcatgacactaccaaaacactttcattgtttcaaagtccacttgaaatgctacgacacatccatcatcatttgctctcactctctttgaaacgggtctagctgagaatccagctggtcttatttctgatatttgagctaaaatcctgggttaaagcacattcttaatgtgccatagattgccgcaaacaatactcttcttagctatttatctttagccatttcttccagtgcagaaattcattcatgtaactctttccattttgtcaactcgtaaaactccccaaagtaaaatctacctgatcttttatgatttttcctccttgattttcatctgttaatgttctttttagagcaaatcctttgagtgagtttgactctgagctattgtcgtcagaagtaggaaaagaaagtttctgcatgaaaagtcaagatcaaatgacagaaagagattttgaattatctagacatgaatttatgaagggatccacagagttggtgattgccacatcctccagcttgaggtgtcacatagttggcacccttggaagaactgctgggcctctccatagttgattataaaattattgacccaagagaaagaacagggactcttgagtgatgttctggtccgtctcccactgcccccagggcttctccacagcactgtcatcctatcttcctcgtgactaggggcctgtaggattatggtgacattaaggaattaaacgtgacatctaaagccatgcacaggccaggcgctatggctcgtgcctgtaatcccagcacatttggaggctgagacaggtgggttgaatgaactcaggagtttgagaccagcctgggcaacatggcaaaaccctggctctccaaaaaatacaaaaagttatctgagcatagtggcacatgcctgtgatcccagctactcgggaggctgaggtgggagaattgcttaagcccaggaggtcgaggctgcagtgagccaagatcacacccctgcactccagcctgggtggcagagcgcgaccctgtctcaaaaataaaataagccatgaacaagatagaactgactggtttccacatgaataggacccctacagccttgggaccagactgtacccaaattactaatcaaccccaaagcctggcacagtctggtgtatttagagtcatgggccttttttctcaaccttcagacctttctctgaggctctgagctgattttagctgaggaggccagagtaaacccaatctgcaggtcctccctcctggattcctgagttgggaaggggcctgaggtgggtcagacggagctggtgtaaataaggtgaactcattccctaagcacacacgccctgtggctgctcaacaatttctcttgggattcacgtcactaaggtgtatgtgactgtgacatgaaagagagagtgtttataccgtcatcttatatccacatcataattctggatcagaacattgcaaaatctatatgtgagactccttttgaggccaaaagtaattctaaccaggctgaggtcagagtgtagagtttgtggacgcacctttattttgatacaatctgtacatcattacatttcctcactggcattccattccccttcatcactcaaccatcaactaaccatgactaaatgttaacttacaaaatgtgcaaagacattcagggtcatgccttttcaactgaatgttgataatacgagtgttcaagttgagttttcttctttcttgcctgactttcctattcactttctgtgtcttcatgcaggcccctggctactgacttatgggaagctttaggataaggacatacctggtgttctgaatgtgtatatcccccaaagtctgcaatctcagctggaactggatggaccagtattccattacccagggccctggctcatggttctctcctcttctcagtttactgttggatttccctttcttgctattctctttctctccagacccctctcaattgcctttcctaaagacagaccttagcaagatgggccaggacttgggacttcgcacagcaccctgcagtcccaagccagcatctactgcaccccatcttcaggactctatcccccaaacatgctggaaggcatcagcttatgagaacccacttttttctgcatgactagcttgtaaggaagaatctatggacaggatttccaagaatttcccactttttcaaaaaatgtatgtgacttatatttggcttcaatccaagagcaaactcagtggtgaacagctccatttctgtgcacatgttggtggaatctgcagaaatcgatgcaacatttctttcctgtctgggctgtttgtataattgtatataaatgtagcaataaatatattctaacatcagcctgagccttactgcgcacttgattctgcatcctggtggtaggcggtgaatattgcttgcctgccccatctcaggttcccatcttctctgatttcagttacttcggacctggccagtgtttggagaaagagggttgaggagagttcagtggcagagctgggatgtgaagcagcattattaattcataagatggcactagtcctggcactttgaggtgttttgaatgtccaaggaccgaagcttagaggattgggtgacagtttgtgacatgagtcagctgcattaacagtcactctggctgggcacggtggctcacgtctgtaatcccagcactttgggaggctgaggtggatgggtcacgaggtcaagagagcgagaccatcctggccaacttggtgaaacccccctgggcatggtggtgtgtgcctgtaatcccagctactcgggaggctgaggcaggagaatcgcttgaacccgggaggtggaggttgcagtgagctgagatcgcaccactgcgctccagcctggacgacaaagcgagatcctgtctcaaacaaaacaaaacaaaacaaaacaaaacaaaaaacaaccaaaaaagtcactcttacagccttcaagagcatgttgtgctgtgattatttgacaggtatctgctgggcacgaagttaccccttaaagattttctgaaaaaccccacaaaatatgccaacatgacataggattttccatctgtcactgatgtttttcaaggatattaagtctagttattttagagacaacctcctcctacaggggacactaggcagatacaatattgtttgtctaatatcaaggaatatttattcccaaagtggtctcttgtaatttatgtgaaatctttggttatcaggcacttttataacttaaaggataaccacatagttgtggtttcttatcaaattatggtttctcagtcctctccttgattataagtggaagttggcataaaatcattcagtcataagacctgggaatgcaagaaacgaaaagttgtaatatccggctgggtgcagtgactcacccctgtaatcccagcactttgggaggctgaggtgggcggatcagttgaggtcaggagttccagaccagcctggccaacatggcaaaaccccgtctctactaaaaatacataaattagctgggtgtggtggcaggtgcctgtagtcccagctgctcgggagaccgaggcaggagaatcgcttgaacccggaaggcggaggttactgtgtgtcaggattgcgccactgcactccagcctattgttaccctatggcaggggcaaacagctcttgcaagattactttttgtgtattaaaaaatacagcctggaagagaattgaggaaatcatctgtcaagctctttaaaacattgaacaagtaactctgaagagttgtgccacatctgttcttactctcaccttttaatagatatatcagggaacctgaggctccaggtcaaaagataaagagggcacagcgtgggccgctgccttcaacagctaattcctgtgcaatgcactgggcaaaaaccttttctacatatgggtttttctagccaggactggtgatatgaagggacgttattataaaatgtatgggacaaattaccaattgcttcggtttataatgcagtaagagagaatcccaattagagataatgctgtataatcaaaagtttggttaatgaagctgtgaaggattgagagttttcagcctgtgggtgttaaaacctgggcatttgctgcggctctgccactaattagtagttggaatttggacacatcactccaactctcagggcctccgattcctctgctgtaaaatgaggtgtttggactaaatgatttctaaggttctttttgttcttagagtgtcttctttggaagagggaaaggagtagcataattttcatgttaaagaggaaggtcattagatggcaaaaatgtgcagttgagaggagaaaatagtttattctattttgttttgtaatttcaagatttattttagatgtagggtgtacatgtgtaggtttgttacatgaatttattgcatgatgctgaggtttggggtatgaatgatcctgtcacccgggtagtgagcatactacccaatgggtggtttttcaacccctgcccccaaccctctctcccgtctctagtggtccccagtgtctgttgttcccatcttaatgtccacgtgtactcaatgtttagctcccacttataagtgaaaatatgtggtatttggttttctgttcctatgttaatttgcttaggataatggcctccagctgcattcatgttgctgtaaaggacatgatctcattcttttttatggctgcatagtattccatggtgtatatgtaccatattttctttatccagtccactgttgatgggcacctaggttgattccgtatctttgctattgggcgtactgctgtggtgaacatgtaagtgcatgtgtctctctggtagagtgatttcttttcttttgaatatatacccagtgatgggattactgggtcaaatgatagttctgttttaagttctttgagaaatctccaaactgctttccacagtggctgaactaatttatattcccaccaacagtgtataagaattctctttctccacacctcaccagcatctgctgtttttttttttgacttttcaatactaaccactcagcctactgtgagatggtatctcattgtggttttgatttgcatttctctggtaattagtgatgcggaacattttttcatatgtttgtcgttgcttgtatcttcttttgagaagtgtctgttcatgtcctctgcctactttttaatggagttatttgttttttgcttcttgaatgatttaaatttttcagagactctgaatattaaacctttgtgagaagcatagtttgagaatattttctcccattctgcagattgtctgcttactctattgatagtttctcttgctgtgcagaagctctttagttaaattaggttccacttgtcaatttttgcttttgctgcaattgcttttgaggacttagccataaattctttgctagggccaggttttcttctagaatttttataatttgaggtcttacatttaaatctttaatccagcttgagtcactttttgtatatggtgaaaggtagtggtctagtttcattcttttgcatatgcatagccagttatcccaacaccatttattaaatagggagtcctttccccacggcttatttttgtcaactttgtcaaaaatcagatggttgtaggtgtgtagctttatttctgggttctctactgtgttccattggtctgtgtgtctgtttctatgctcatatcatgctgttttggttatggcagccttacagtatagtttgaagttgggttacgtgatgcctctggttttgttctttttgctttggattgctctggctatttgggctctttcttggatcaatatgaattttagaatagctttttctaattctgtgaaaaatgaccttggtagtttgatagggatagtattgaatctgtaaatggctttgggcagtatggccattttaataatattgattcttcctatccataagcatggaatgtttttcgctttgtttggatcatctatgatttattttaatttttgttttattttgagacagagtctcctctgtcacccaggctggagtacagtggcatgatctcggctcgctgcaacttccacctcccaggttcgagctattctcctgcctcagcttcctgagtagctgggactacaggcacacagcaccacacctggctaatttttgtaattttggtagagatggggtttcgccatgttggccagactggtcttgaactcatgacctcaggtgatttacctgccttggcctcccaaagtgctgggattacaggcgtgagccactgcgcctggcacctgattgctcttgctaaggtttcaagtactatgctgaataggtgtggtaagagtgggcatccttgtcttgttcctgttcgtaaggggaatccttccagcttttgcctgttcagtgtgggtttgttatagatggctcttcttattttgagatatgttcctttaatgcctactctgttgaaggtttttatcccgaagggatattggattttatcaaaagatttttctgcatctgttaagataatcatatcatttttgtttttatttctgtttatctggtgaatcatatttattgatttgtgtgtcttaaaccagccttgcatcccagtaatatagctgacttgatcatggtgaattaactgggtttgatttgctgatattttgttttggatattgtgtctgtgttcatcagggatattagtctgtagttttctttttttgttgtgtctttgccaggtgttagtatcagggttgtgctggcttcatagaatgagttaggggggattccctcttcctcaatttttgggtatagtttcagtagaattggtattgacttttctttgtacatctggtagaattcagctgtgaatccatctggtctagagcttttcttggctgctgggttttttattactgattcaattttggaacttgatactgctctattcagagtttcgatttcttcctgattcaatcttgggaggttatgtgcatccaagaatttatccatctcctcttgattttctagtttgtgctcacagatgtgttgataatagtctctgaagatcttttgtatttctgtgggatcagttgtaatgtcacctttctcatttctgattgtgcttatttggatcacatctcttttttctattaatctaggtagtggtctattgattatttttattctttcaaataaccaacttttggttttgttgatcttttgtatggatttttgggcctcaatgtcagttctgctctgattttagttatttcttttctcctgctagtttgggggttagtttgttcttgtttttctagttcctgtaggtatcatgttagattgttaatttgagatatttccatcttcttgatgtaagcatttatatttatttatttatttaagatggagacttgctctctatcacctgggctgaagtacagtggcacagtctcggctcactgcagcctccggcttactgcagcctctgcttcccgggttcaagcaattctgcctcagcctcccgagtagctaggattacaggcatgcaccacaatgcccgtctaatttttgtatttttagtagagacggggtttcaccatgttggccaggctggtctcgaactcctgacctcaagtaatccacccaccttggccttccaaagaagtagtcatttagtgctataaactttcctcttaacactgcttttgttgcatcacagaaattttggtatgtgtgtctctgttttcatgtattccaaataattttttttttgagatggagtttcgctcttgttgcctaggctggagtgcaatggcacgatctcggctcaccacatcctctgcctcctgggttcaagcgattctcctgcctcagcctcccaagtagctgggattataggcatatgccaccacacctggctaattctgtatttttagtagagatggggtttctccatgtaggtcaggctggtcttgaactcctgaactcaggtgatctgcccacctcggcctcccaaagtggtgggattacaggcatgagccaccacacctggccaaaagaatttttttgattcctgccttaatttcattgtttactgaaaagtcattcaggagcagttgtttaatttccatgtaattgtgtggttttgagagatcttctttgtactgatttctgtttttcttccactgtagttctagagtatggttggcatgacttcaggttttttaatttattgaaacttgctttttggctgagcgtgtggtcaatcttacagtattttctgtatgtagatgagaagaatgtatattctgtgactgatgggtagaatagtctgtagctgtctattaggccccattggtcaaatgtcaaatttaagtccaaaattttttagttttctgccttgatgatctaatgccgttggttgagtgttaaaggaccccacaattattgtgtggctaagtattttcatagtccagaagtacttgttttattaagctggatgctccaatgttgggtgcatatatatgttcaggataattaagtctcttgttgaattgatccctttgtcattatgtaatgcccttgtctttttttttttttttttttttttttacctgttgttcatttaaagtttgttttatctgatataaaactattggctcctgctctcgtttattttccatttgcatgatagatcttcctccaaccctttactttgaacctatgggtgtcattaaatgtcagtgggtctcttgaagatagtagatgtatgggtctttggtttttttaaagtcgaatttgtcactctgtgctttttacgtggggcattcagaacattgacattcaatgttaacgttgatatgtgaggtttggatcctatcgtgaagttattagctagctattttgtagtttctattgtgcggttgctttatagggtctgtgagccatgtatgtaagagtgttttgtggtgataggtattgttttttcatttccatgtttagaacacccttaaggatctcttataagtctggtctggtggtaaaaaaattctcttagtgattgcttgtctataaaagaggttatttcttctttgcttatgaagcttagtgtggtaggatatagcatctttgttggaatttctttgagaatgccataagaagcccccagtcttttctggcttgtaaggtttctgctgagaagctccctgttagcctgttagttgtgtttggttacacgaataagttctttagtggtgatttctgggatttaggtccacccatcacccgagcagtgtacactgttacccaatatgtagtcttttatccctcacccccctcccatccttcctcctaagttcccaaagtccattgtatcattcttatgcctttgcgtcctcatagcttagctcccacttataagtgagaacatacgatgttcgcttttccattccggagttatttcacttaaaataatggtctccagctccatccaggttgctgcgaatgccattattattgttattattattattattattattattattattattattattttgagacagagtctcgctcttgttgcccaggctggagtgcagtggtgtgatcttggctcactgcaacctctgcctcctgggttcaagtgattctcctgcctcagcctcccgagtagctgggatcacaagggcgcaccaccatgcctggttaatttttatatttttggtagagatggggtttcgccatcttggccaggctggtcttgaactcctgacctcaagtgatgtgtctgcctcggcctcccaaagttctgggattacaggcatgagccaccatgcccggccaatgccattcttttgttctttttatgaatagccctatgcacttctgttggcaggttttatattgggcagtgtggtttgatctacaggccagtggatggcacttgtgggtaaaagccagctgcagccaacacagatgggtgtatacttgatccttgttaccggaagaagctctcttttttcctcaggcaatgggttgatctgtgcagtgcaccatggtccgaactccctgctcaacccccggaaggggagaccaagatgggtgggtggacaggaccaagataagtggggctggactgggaatgactgcttacaggtcccctaatggcaagcataagcaccagtgcagaggaagaggtccaatgggcagccatcaagcacccagaggtgtgcctaggtatggagctggggaacttctcagctccaagttctctgcacagggagtgggggcatcctaaactcctgctctaggagagtgagtgggtgctccagattgctggagatctgcctggaggatcaaaaatggccccctgcaccatgatctctgctcaggaagggtggagtaactcaggctatctgggtaggaaggtgctctatatgcctggagatctgcctgggcatgaagcaaagagagcgcctcctgcaccacaaactccatacaggaaggatggggtgatccaggctgctaatccatgggagcaggtgctccaaatgcctggaggtctccctgagtgtggagcaaagagggccccgctacaccaaggactcactcaggaagactggagcagttcaggctgttagttcaggtgagcagctgctccaaatacctggagatatgtctgggggtagagtagagagggccctgctgtgccacgatctctaaggcacccagtaattacacatgcagacggttccagggtgccaagttggctctgactacaaatctttttgcccaggagaaactgtggccgtggcagccctcctcccactccaggcctgtgacagaggagagcacagttccagtgcctactgctgggacaccttccacatttgctgcccagttctggctgtggagggccctaccctgctccagagcaaatgctccaatctctaacctgagactaaaatgcctgcatggctacactgccagggtcaccaaagaatgactgactttgtatgagcctggattaaaagtggcatccttctcttgatcccgggtctgggaaaatatctgccacttttccgtgtccaagctgcttcataagtccgctccagggcttgggagaaatgaaatgctctcccttggcctgggttgtatggaacccctgcggaaagatgggccatgagggactctctgaccctcctagtttctggggcgtcactcacttttattggctgggtgccatcatgggggctgcctgcctaccttctccttgggatctgggatgtcttttgttatgctgatggattcccattttccatcttaaagctcacagaattgatctttatgcactattttgctatttccaagtggctgaggcatgctagaagcctgtaattcaccatcttgcggggaaaaaaaaacgagtgatgaagattgcctatgttcagataccaaaaaatgcattaagataatgacaggtcaaagcaccacctagtcaaaatctttctgaggaaacagaacatacttggctctcacttttcatgccctgttggctggatttcttcttggctctcttctgcacagggcagaaagactgcagtgtgtgtttatcattgggatgctctgatgggaagctgaagtctcagaacaagaacccacttttcttcacgcgtgaattgcccacacccgtcaagctgggcagtgacccatgaagagtgcttctgtaactatcagatgtcagtcctggtcaagttctattcccaactgtgtaagcccaaagctgatgggtgtagcaacacaaagcggggaagctagtcactaatacttaggaaatgcattggtttggggggcttccctcctccagcgtggatgcaacagtcatcagtcagcaccataccctttccctggtggtccactcatttgcttccaggcaggtgggatgagttgcttgactggtaggtttgtagcccagtcctgttcccggattttcctttggggaatgagctgtctgcaggaagcataagcacctccacgccatagtatgctcttccatgccatagtttcacagaggccaggctcccacctgggaggggcaagtctggggttcagtattagaaagcccagtcgccacaggcataagcccacattctctagtgctagctttatcaaggatgaaggtggtctgacagcttcacggccttattcttttgctttgtttctcaatggatttagcccgtggttctcactcgaatgtgcagcagaactgcctgcaggagttgtgaaaacacacatgctgggctccgctaccagagtttctgattcagcatgtcagcagtggggcccaagaatttgcatttcagacaagttcccaagtgaaactgaggctgctggactggagaccacactgaagacccaaggaacacttggctaagagaaggcattctgttattgttccctcaaactccagaagaacccaatgttctcaaggctgtctgagtcagctgggcctcctttgctaacctggggctggcaaacagtcctcggtcagcatgagtaattcttacaaatcaatatcctcttctagcccacggccttggggagaaacaaatgattatggattatcctcatttctgttctatgcagaaagcaagatgagtcaacagcagctgtacatcagccctgaaattgctattttaaaacagagtttgagacatgctcagttctccttggataaaaccttgtacagcactgtgcacaaataaagactttttaataatgatggagctagtggattttaatgacttgtcattgaagtgtaaaagtacaaacatttgcgggttagggaaccgtgtgatgaatgccagtggattcaggagaaggccagagcagagtgtgtccccgcagacatccctagtgcttttctcaggccctagccccccctccaaggtcagcaccgtctcaaactctaacaggtagatatgttttatctggcttgcactttatataattgacatcattcagcaggttctatgtgtcgtgtctgctttcttttactccacaaacgcaatgaattcctaaaaatgtctctcctctgatcatccgtgttgttgaccacacatccttcactccagcctctgtgagtgggctgcccgctgcacaccccgcctcccacctgcaacaagtttttgcaacttcctggcacagtgtggctgttccagtacagccagttccctctaggactttcccatctccagggcttccttcaggcctcccacccccatcagaaggggtttcccttcttccctctgccgatttccatcagtcagagcaggtgaggctctaccacccaccctgcaaggcttacaccttagaggcccgtgccttgctctctgttcatttgggggcatcttgttctgcacagtccctcagggacctggatttccctacaccaggaggaacatatgacctcttaggcaccatgtcagggagacagaggctggagaaccccacagggctgttcaccgcctgggcttgggaatgacacctgtctcttctgccaatatttcatggtcagagctagtcatatagcgagttctcttggctacaagggggatgggaaaggcaggatagcaaagggaagatttggtgaacatccctgttgctgccacagtgctcagatcagctccgtctccagcgccagattgttctatcatcccctctgcccttgggctctcacgtgctccctctccctcctgttattctacagtatctgtatcttgcacactggtggtcttccaggggacatgtctggggatgtttgtgattgctgagatttgggtgtgtgtggcactgacatctagcagggataggcctgggatgctggaaaacatcctacaatgcacaggacagccctcccaacacaaagcacggcctagtcctaagcatcgatagcagcgtggccagagccctgtagtccagggtgccatttcagctggcgtaggtcttgcctactcctgctgaattgcaactctggggaaaacaatcatggtggcctaaagccaggcttggtgacagactgagtcctgctgccctggccccttcagtgggcctgatgactctaggagaaatgagggacagaagtgaacaggtaatagagcagtggcagagaaaaaaggtcatctgagtgttatttgtaatggcttcaccaggcttaaaaatatagcagatagtctgggtgcagtggcttatgcctgtgatcccagcactttgggaggcagaggcagaaggatcgcttgagactaggagttggggacctgtctgagcatcatagtgggacactttctctacagaaaaataaattggctgggctgttagcgtgtacctgtagtcccagctatttaggagactgaggtgggaggatcacttgagcccaggagtttgcagctgcagtgagctgtgattgtgccgctgtactccagcctgggtgacagagcaagaacgcaagaacttttctagtatctatcgatacagatatacatatattaatagcagatggcaagccaagtagagcttctcacctggagtgctcctccctccacgtagactgggcactgggctgcatcgccacctctgagaggagctggcaggtcctgggtgtgtacactcaggtctgctgcaccctgtacccaccatatttcttcatcagtggctgttttttcattggtggttgaaccaaggtgcgggtaacccacattagcaagcttgagtcatcacccttcactgtcctcacagtgggctgactcctgtggtctggctgtgcctagcattggtttgggatgagtcgcattctaaggccaactgtgccattttctgctgcatgactttgggcaaatcatttagcctccctggatttcaattctgacgcctgtaaaagaatgatttgctctctgtaacatagatattttattttgttcctccccaaatacatagaatccgtagacgctcagaactcatcttcagttccttctggtttaactaaatgcagcaatgctattcatatgtcctgttaccccggacagcctgctcacctggccttgagggatggttgtcaaaagtttccctaaaggcagaaatgaagagacttggtacaagttctgagaaaccattgcccatggcaatgaggaacaggattacccaagagaattaccattctcctattcattcattcaataagttgttgttgttgttgtttgagacaggggctggctctgtcaccctggctggagtaccgtggcaagatctcagctcactgcaacctccatctctcaggcttaaaccatcctcccacctcagcctcccgagtagctgggactacaggtgtgtgccaccacacccggctggtttttgtattttcagtagagacggggttttgccatgttgcccaggctggtctcaaactcctgagcccagcaatccaaggaccttggtttcccaaagtgctgggattacaggcatgagccaccatgcccggccacattcattcaacaaatatttctgaccctcctcaaagtcctgggcactggagatgctgcacaatgagtggctggaaggcgtctctgccctcctggagctccacctcttccgcgtctcccttggcacccagcactgcggcaaggaatctgtggagctcagtagtcctcactcgctgagagctcagaggagaagggtagaattggaagtctcagctttttccactcagaaagctgctaaagcagctgctgggtgtctctcccccaccttctcttgtgctggccctggagcacagtaggcatgggagagggtggccgagggaggaacagggaggggtgaggagtgtgcagattgccaggtgagggggccttgtacccaagtcatcaggagttgatggagctgctgatgactccagggtgtgcctgggtctgagtctgaggtggtaacaatgtctcggaataaaagctgcccccttttttttcaggccactgctgcaggacagtgaagctgacttaaaatgcccctgccctggtaagccacctggtgtatgtgtgataacatggccttggacgcctctcttcccttgctctgttggaagttggtagatatgctccggactgtacagcctggtacttgcctttgtccattgccatttctgggaccacccttcaaagccacacattgtaaaatgaaggcacaggggccatgcccccattcttggccaagccctgaggctctgctgcccaactcttctaggccccttgacctcttgtccaccagggcacagggcagtggaagatactgggaaggggccaacctcacatagctcacgaccttagaggagcattaagatgcagccctggccaggcgcggtggctcacgcctgcaatcccagcactctgggaggccgaggcgggcagatcatgaggtcaggagatcaagaccagcctggccaacatgatgaaaccccgtctctactaaaaatacaaaaaatcagctgggcgtggtggcgggtgcctataatcccagctactcaggaggctgaggcaggagaattgtttcaacccgggaggcggaggttgtagtgagtcgagttcgctccatttgtagtccagcctgagtgacagggcaagactccgtctcaaaaaaaaaaaaaaagatgcagccctgagctggtgtgcgtgtgtgtgtgtagcctgggtcctggccaccacctgagctgctctaatccaggcagatccagacacattccaaggtgatacctggaatggggcaatgaagcagttttgtccactcattcatcatatgtgaacggagcaaacaaatcaaccaaggccctgccttcatggagtgtgtgtcccaggaccgggctgagcgataaaggagccacacagttcatccgaaggtttcatgctgtggaggaatataacacggggcacatccaagaggggggctggagctccgattttctaaatatcaggacggcttcactgagaaggtgatgtttgagcagatacccaaagtgagagaaggatccacgcagcacctggaaggataaagccaggcaaagggaatgacaaaaatgtggaggttgcagttagccgagatcgcaccactgcactccagcatgggggacagagcgagactgtctcaaaaaaaaaaaaaaaagttctgagataggagcatgcacacagactgaggaaactgcaagaaggctgatgaaggggcctggagccctacagagcagaactagaggaacagcttcacgagggtgaccacagagctgtgtgtgtgctgcctgctacagtggcccggggaaatgggtaactgaaggtagggtgagacctgccgtgagattggtgacaggggactccagcaggagacactttcttcctggcctggagaggaggggaagattccgaccgctgaagttgggagggaatgaatcccagcccaaagctggagctaatgaggaaaaccttggccatatgggggttggggaaataggatggggtccaatttggctggcacatagcatgatgagcgctgaaggacaaggcagatctacacagtcaatttcacttttgcaactcaatagctttcttaaagaacaaagtccagggccaggcgccatggctcatgcctgtaatctcagcactttgggaggccaaggcaggtagatcacttgaggtcaggagttcgagaccagcctggccaacatggtgaaaccccttcactactaaaaatacaaaaattagccaggcgtggtggtgcctgtctgtagtcccagctactcaggaggctgaggcaggagaatcgcttgaacctgtgaggcggaggttgcagtgagctgagattgcaccactacactccagcccgggcaacaaagggaaactctgtctcaaaaaaaaaaaaaaaagaaaaaagaaaaagaaaaagaaaaagaacaaagtccagagcactgcagggaggcctagaggctgaggcattccatagctggatctgcaggtacaacttaaccttgttagattttattattataattgttttttagacagaatcttgctctgttgcccaggctggagtacagtggtatgatcttggctcactgcaacttctgcctctgggttcaagtgattctcctgccttggcttcccgaatagctgggattacaggcacccaccaccacgcctggctaatttttgtatttttagtagagacagggttttgccatgttgaccaggctggtttcaaacttccaacctcaggtgatatgcccacctcggccttccgaagtgctgggattacaggcatgagccaccatgcctggcctagatatttaagagaatattctgattactctgtggaggcaggatttaggagggcacaagtggaactgggaagatggggccttaacatcctagagacaatggaaaggccagggcagtgacaggaatgaatatttgctgggtggtggctctgggctgggcatggtacttcctggcgtggtgttcattgtcactttttgccactggggctcaggcccaggattccacgtgtgatggatggttacagggcaaaaagcttatccagcatcacccaaataaaaagcctagtttgatcctacttccaaaatgtgtctggcatcagttccccggcttctggcccttgggtggaccttggatgagttctcctgggatggccattgcggcagcttccccctggctgaacccctctggtctaatcaccctcctcaaaattgtgctccaccatttggtacccatgtaaaaatctttggtattttccctggccctggtactacctgtttgcagggaccccaaactcgaatgtctttagttgcttggtgtaacgaaatcagcagggctggtggcagggatcaatgtagagtacaaacatggctgaaggcattcagcaaaaagagaaacaggttgtgccagccaaagcagatatgtctgtcatcaagtcaagccccagtgttccctctttataatctgtaaaggcccaaatcctgagctgctcaaacagcagcctctgcaacctggcctcagtgtctctagcttcctctctgcgccctcactactttggctgggctacacctctgtccctggaaggtgctctgtcatgcctccttgcttctgtacctgatttcttctgacttttatattttctgccccccaaaatctatcaacctttgggacttaggtccaaggccaccttctctgtgaacctgtcccgtcttcccacagcatgatcattggttgcaagcatcatagatgagtccctctgccctgacttagacggtgatctccagggcagaagccaactgatgtaatagccacggcatagtcctaaacatgatgtaggcagtggtgacccttagttctctccccacactcttctttggcatgtaacttagcaactggatcgatcagtcaaaggggaaaatgaacccagcacagccactgtttttgcacccctgatttgggcaaagggggaaagtactgaacccaaattcagaatcaggatgcagttgagttctgcactagaagagagggcccccttgcttttgttagaaagaccaggagagctgcaggtggagggtgacatttacgtggagctgtggattttgtctttgctggtgaagcagagatggaggttatccctggcagaggagcctgcagtacacagcctggaggaaacagagtgcttgccaggcatactgtgagacgggccaggggtctagaggccatggtgggtggggagggcagatggtggacctgggatgtcactgtgtggggagttttgcatgttatggtcagacatcctggcctgatcagagaggcagggtgtgtgctgggcgggtatgagggggagtgtcggggagggcacagggaatgtcaaaggtttctaagtatatcatgagacggttaactctagctacaggttagaaggatttgaggcagggtggagcagtagggagactggatagggaagtgtttgctgtaacaagagctcccaggccggatgcggtgtctcatgcctgtaatcccagcactttgggacgccgaggcaggcggaccacctgaggtcaggagttcgagaccagcctggccaacatggcaaacctcgtctctaccaaaaacacacacacatacacacaaaagagctcccaggccaggccaaggtccagccagagccatggagagggacaaaggtgaggcaaaggtgatgaaagtgagatctattcagaggctgaatggaggatttggggggctgcatatgtcctctgggagggagagggaagaatgggggccaaggtgcaggcctccagctgggaagtgaattctgtctttgacacctctcatgtcctagacgctggagctgaacatcccacaaccctgtgtggtgggttaaaagatcaccttttacaatagaggaagtagctgagcttcaagattaaggacctgctcaaagttgtgcagtgcagcaatgggggcaccagattagcagctgggtctggaccccaccacctcaccacttcccacaggagttcgcactgtcgcggcctcaggcctcagccagggagtggttggagtctcaccgttcctgtccccgggtggaggtgggaaattcttctccatgagcatctctccttgtcttggcttttactactttgccctgaggcattttgctttacagcttgacagaaccgatgtctctggaaatgtgtttcttttctctggaagatgcatttggctccagaaactctgagcctctcagagggtcttttgggcaaagcttcagtcacggtggaaggggaggtggtgtgcgcttggcccttggcaggctgcaggccagccgactgtgcgatgttgcgctggttccttcaggtcagcagagaggactccgaaagggcctggtgatactgctacctgttcagatgaactacagcccagcagaataggcctgagttaggggacgcacccaccaccttcggctccttaggagttcaaggagcacaagctgtggcctgacaatccccctctaacttcctgctaggcctccagagcctggcgttgctcaatccttgtaatccttgattaaaatattccctgcgccacccctctcaccacttggcatttcctgctaccaatctggaaagcggtatcacaagtctgtatattaagttgtgagagagatggagaaggatcttttaaagtcagttgccatcttcctctttccccatctgcctacagtcactgctgacagggtgatggcaatgtccccaggcaccccgtggctggggggagcaggaggcagagttgagaatgcttacccttttggatgactcagagccaggagatgatgggatgtggaaggcaggagccaggaggggtactgcctggatgggctctggggtttgtaaaagctggtgctaggccggacaaggtggctcatgcctgtaatcccagtaccttaggaggctgaggcaggcagatcacttgaggtcaggagtttgagactagcctggccaacatggtgaaaccccgtctctactaaaaatacaaaaattggctgggtgtggtggtgcgcacctgtggtcccagctactttcttgaacctgggaggcagagggtacagtgagccgaggtcacgccactgcactccagcctgggcaacagagcgagactctgcctcagaaaaaaaaaaaaagaaaaaaagaaaaagaaaaaaaggctggtgctggtgcgccctcacccacacccgccttggcccaggggcctcctgtagtccccactcccgcctctcccactgcttcccacctcccttcaatgtaggcaatgaagttgagcttggactagaacaggcatcttgctccaatcctccttgtctaatttgcagggttttaatgtgtattgcattcactatggcacaatgtgctttgtccttgtcttaatttggcaacatacagagcaaacccataaatctcctccagagtttactgaatagcttttcatgtagttaccaaattgtatttgccatctccctcaatcttttcacatgcatatttgaaagaattattcaaatgaatgataattacatccttggaaagtggagagcagtggggagagggctttgaaggctgagacagaaagcctcgcctctggcaggcccccacccccaccccaggggctgaagggggaccctctgtgcactgacacccacccacccagacctctggacaagagcaggaagtgcatttaaacattgtacttgccattctttcagtgctctcttcctcactgagttctcctggggaactaggaagggaatctgtttggctacctaattaaactttcctatttttaatctcatggtgaatttgtgcaaaacacaaagcccaggaaaatgccagtggcagctgcttcagcataaaaggtgttgtgtttgcagtgggcattgtcaagagtctgaaagctaaataggccttctctaaaaacaccctagaacgtccctgagcatgattggaaacattagaaataaatgtactgccttttactctccagggctacaaagaatgctagagtggagacaagagtccagactctgaaataacctcctttggacacagaagctaccactgttgcttatcagacgcagcgggccctgggtttttctggggccttaagcagtgaaccctggtcagctggcctgagtcccaacccaagcccatcaccacaagcctcaagacaggaagatctcagtgaaacctttcctctaatccaagtgacatcattgtcgcaggtgtttgtacatgaaagcagagtgatgaaggtgtgtgggtccacggaagaagtaaaaatacagcactagttcatatttttcctagtctctccctgttcccaggtaaagttatagcat

SEQ ID NO: 170 - DNA, 16438 bp, Homo sapiens
atgcactcaagcagagaagaaatccacaaagactcacagtctgctggtgggcagagaagacagaaacgacatgagcacagcaggaaaagtaagcaaaaaatatattactgttggtaatatattctcatcaatataacaaagaaaggaatacagtatttgatgaataatttaaaattcatatctaaattagaaatgatatgctgaaatatgatatgcaatatacacctcaatatgtaatgtatactgaactgcagtggaaataagctattcttaagtacctttaacaggaatgtatagaacctgtgtctattagtctttatttcctacattaaataaatttacagtaaaatgatagtttattccaagctaatcatgactgatttgtaaatctaaagttagaaaagtctttaatggcaagttatctttataataagaaaccataattcaaatgtgttattatttttattcaaattttttatgaacacaggaaagttgtctgacagaagtttgatgagaggaatttgactcagaagactgaaatatcctttaaccttactataaaatatcttacaaaatactcattgatttcacagcattagaatcatcaaggttaagcaagacatcaacatgcaaattctgattaaaaggggtccattatgatacaattcagggaatttccacaaaaatcctatggaacagtatcttccccatttaaaagttaatatggttttacagaaaatcaatgatacaatttgaataataatacaatttgaatcacttagcactaggaatacagatatttggttttttcttctataaatttgtacttatttgctcaatgtgtttacaggtgcatgtggtcattcaatataatcaattgatttttttaattgtttaattacataaacctgtgcaactatgtccagtcctttttttgtgttaggagtgtaccacactgtaaaatatctcactatgataattcaatttaaaggttctgaggcttctctctgcattgtgtgacaaacaggctcatatcaataagactggttgatggagctagaggacgttattctaagtaaagtaactcatgaatggaacaccaaatatccaatgttctcacttaaaagtggtagctaaactatgaggacacaaaggatgagaatgatataatggactttggggactgagggaaaagggcagtaggaggaataagacataaaagactacatattgggttcagtctacactgcttgtgtgaggggtgcaccaaaatatcagaaatcaccactaaagaacttatccgtgtaaccaaaaaccatctgcaccccaaaaactattgaaattaaaaattaatcaatgaataaattttaagataaaaataatgcatgtaatttacccagcacaggtcacaatgtgcctgtcacatcataagcacctcataataagaatcttcctactattagtaccttctgtctaagtattctggtatttattttggcattgaccatgttgaacatcctacaaagttgaaaattttgacaaataaataatgaaaatgaattggcagaaaaataaatctcaattgaatttttaaattatatttgcaattatgttggttctttctagaaagggctctgcgaattatacatgctttaccacaacgaagatgggttttacagtacactgccaagcactagaaatatatgctgaactttatttttaagaacatctatggataagctctgctaaacagaaatccaagcacactgtttctccagttttaaaatatacatgcgtgggtctgagtgtatacacacacacacacgtgcacacacacacaccaccaactctaatctctataatatttggctcaaatctaagctgaaagaagtctctacacataaattagattacaaaacaggctgccaaagctaagtttcaaatgagtaggaaacaagtagcacacagaagtagtggagagagaaaattaaaagaggacaataagcaaatagggagagaaagaaatgtcattgtgcgcaggaaggtaaatgtataattgctcttatagagtcagatccttttggcctaagcagaaaattgagcaataaagcagtgtattttatgtagacagacactgactctgtcagcaaaataaaggtgacttctaacttcatatatcagctaatagttgtgggtagacgagcattttcaggacggcattaggaaataccaggaataaacaccttcagagaaaaaacaacaacataagaatggcctaaataaatatattccatttttctcaatgtcttattatactttgtttatctttccttatgttattgctttttaaaagatacttttattctctttataaaccagagtacttcatttccatggagcacttgttaggtaccagacatgggacgcaatattacatgtacaaagatgaaaagacacaacttatgacttcaagagtgggaaaacactgtcaccatctctctgtttgattttctaggtaatcaaatgcaaagcagctgtgctatgggaggtaaagaaacccttttccattgaggatgtggaggttgcacctcctaaggcttatgaagttcgcattaaggtgaaatatttttccatttatatttcattttacatttaaaaaactcagagaacattaaaaatggaaacatccaaaaatccactaagaggcatatcttatatgatcacccagaagataaaattacatttgttgtcaaggaaaggtataaatataaattttaaatttttaaaaaatgatcaaagagtacatacagtataattccagtaaaatacaaaagaatttatgtttgtacagaaaaaaattccaaaggatatatatcaagacttcaaaatcaattaatattagatattttccatgtgttactttgctatttctacttctattttttaaagcgtgcattcttacataagacttaaatatttcagaatcaattatttcacagattattctaaattgtttaattcaagaagggaaggtagagaagggctttagactgaataaccttggggataaactgaatctttcatatttaggaatagtagggattagtagcaaaaccctcaaatacattttagaaacacaatttcaggaatttgggtatgttaaattcatctagttacaatcttttctgaatctgaacagcttctctttattctgtagatggtggctgtaggaatctgtcacacagatgaccacgtggttagtggcaacctggtgaccccccttcctgtgattttaggccatgaggcagccggcatcgtggagagtgttggagaaggggtgactacagtcaaaccaggtacaggattcacactcagggaacacgtgtggttcaccatccaggatttcccagcctggataaggaaaccaaggcaatgagagacgaaagtgcttgcacaaggtcaccgcgcagccaggacttcaggagtttcctctttccctctctgcctgcctgacccaagcatgtatgcattcaggcactcatgtattgtacccttcaaccattatgtaccgagtatctactagaagccaggcaccaggttagagcctggagatatgtgaggatcaaaagagacacagtgcctaccagtgtggcattcatagtccagtaattctgtgttagtgttggctgaacactgtcttctgtcagggcccagatagaagtagaaacgggaggagggaaaaaaagtaaatgtggaaactgttctgtgctgagttcacaaaatggaggctacatggctacggatgaataaacatgaccttttcttaggtgacctatgcagctccttcaccaatttcctcttccaacatggtgtctcttcctgagcatggaatcaatgaaacaggctaggtgaaaggaaatgaaagaaacgtagaaggaaccatcccaccatcaacaatgtctgccttgttaccttcagccatgcttaaatgcaactggttacagattactaattatttcatcttcaatatttattttaccctaaacttatgtattaatgtaaatacttttagaagtaaagggttaataactaggacattgccataccatcattttcacataaactttacctataaaatgttaatgcaccaacaatttttcttgatcatgtggaatgtatagcataggtgattagaaataaaaattatgtttaattttaaaaagttgctttagcctgtagattcaccctgcccccttaccaaataccaatttaaactgtgaacagaaaataataaaataaactatccaaagtatgttttagctctattttctttagttagaaataaattaacaacaaaatgacagccttactttttacccctactccctccaccataacaggaaaagtagataattcgcaaattatcagctaaaaatatttgttaagtccattcttatcctaaaagaaagtgcctaacttgttgtgaagagctgaagttttcagagaaatttctggaattcttctttgtcccatttttgtttttctcaaaaaaaaaagacctaggattttttaaagcattcatttcataaaaaaagataagcatagtcactttgaaaagtcaagaattggttaaaaattctcatatttattgtaaatcaatcttttacaaaataccagatcatcccaatatctacaggcactataatagatcactttcaactaaaatttatatttatacttatagtaagaatatttaagatttaattagttaaagtttaaataaaaagatgtttgcaaagcctccaggagaaatcagtacactgtgtaaaagttaactattagtacagtggaagtaatttttttaatctgtgtggtctcccacatttgcgatttctcagtaggaatcctcaggcacttataaactcaaactgaaaacaatgctgtggcaggcattgaaagatgacatagttattattgaactctattccttaaagacttttaaagaaacatgcttctaatcaatacatgtgagctttaagtctttgctctattaattactgcatagaaatttaagaagaacttgttttattcctctccaggtgataaagtcatcccgctctttactcctcagtgtggaaaatgcagagtttgtaaaaacccggagagcaactactgcttgaaaaatgagtaggtttctgatgctctctttgcacagactttgagtttgcacattacttatgctcctgtctcatgcctttgtgtgtctgtgtattgcactgcccagtctaggcaatcctcgggggaccctgcaggatggcaccaggaggttcacctgcagggggaagcccattcaccacttccttggcaccagcaccttctcccagtacacggtggtggatgagaatgcagtggccaaaattgatgcagcctcgcccctggagaaagtctgcctcattggctgtggattctcgactggttatgggtctgcagttaacgttgccaaggtgagaatgacaatgggtgataaaactgcttacatgcagactgtcggaaaccaaaagggaagcaatttcttgcaagaatcagaaattatttttgtagatttaaagtgtcgattatgagtagaaaaatggcccagaaagaattgagtacacatgctagaaatttcaccaatttattgcagataaaaagttgttacgaataaagatgtcatttacaataatttttcttctgaatttgctgtttatgggatcatgaaattttagacctaagaattcatttagtaattcattcaacgattagagagcacctataaatgcctcaggcaccataggttctgctaggctctgacagcaaaagtaaatgaaatgaagcgtttgcccttgaggaccatctagtctgtggatcctctcctcccagaaataggatcaacagtagagtccaaaaccttacctgatgcacctccaaaccaaggctcacccactctgtggattcttagacggaaagtaataaagactcagtgatgcataattcactcattatgggatttcactgctaaaactaactcccctggcatgaacacacacatatacttcagaagtggtaaatttcaagcagaaattctttaaaggctcctcatctgagtaggctgaaaatctagtagtatgctttattttatgaaaccgaggttcagatatataaagatatttgcccaaagcctcagtgctgagactaaaatatatttttaatatgagagctgagactaaaatatctttttcaaatctcctgctgaatcttagctcgcaatacataattattagtgtttttaaatcacagtcacaagtcttgtgtttttctaagtaaggtagaaaatggtgttgtcccccatagtatgaataatatttggtgaatgaatgagtgaatagacacccttaagggaatataaggatgagattacttgggacaggaaagcatgttacccacaatgaagactgactatgggagactaggtttaataaatagcccctagccaaccacaaagaaaaaattcagaaggcatcttttccaaatttctgtgactttagcacttagccccttgttcagttgcctcatacgtgttagcagatggtcaaagtgatcctacccaagaacagaagatgaggatactcataacaatagattgtatttgttattgaaatatagacaaacatttcattgctgtgttgttcgctagtgtatttttaaagcagggatatactggtcacaactaccgaacataaatgaaccaatgagttaattactgagggcttaagtggaatatttttcagtctcctggagtagccttttccacttattttgttttccaaatattgccgttgtgtatgtatgagttactgaagctggctatcaagggatttcagcaattgacagtcccttcaagattgtaatcactgccatctggatctcaaagatcatccagtcccctggttcccagcctgaccttcccattggagtcacctggggactgagtccacctgcagagattcctcatttaattgacatgggctgtgacctggactgtgggatattttgtaaagctccccagatgaatctaatatgcatcagtttgaaaaccactcaactagttcatccccttgaatttaaaaataaagcaactgaagccaaaagaggttttgataaacggttggacaaaagagtctgagtagttcttgataaacacctacgcatggcactttatgaagcttaggcactttctaacaatcatcacttaatctatttttgcattttctgaaaacacaggtcaccccaggctctacctgtgctgtgtttggcctgggaggggtcggcctatctgctgttatgggctgtaaagcagctggagcagccagaatcattgcggtggacatcaacaaggacaaatttgcaaaggccaaagagttgggtgccactgaatgcatcaaccctcaagactacaagaaacccattcaggaagtgctaaaggaaatgactgatggaggtgtggatttttcgtttgaagtcatcggtcggcttgacaccatggtatgtaccatgacatgccctgagatttctgcctctgcaacctggaagatgcatttaggcagcaaaatatatgttttatgtataaaggatatttttaatgatgaatggaaatttcccatcatctgtttgttatgtggcttgtttaatttttgttatgagaaatcttctcttccatcaattacccaaacctgtctcaagtcatatttcctctagaggaaaagaaaagggtttgtttttcttaactgagcaattatagatttactttattaatttttagttaaaaaatataagttcaagtaaacataaataatataaattctgttctcaaattggaatgttttatttttctcctacattcttaacaaaaatggtttaacaattttgcctatgttcttaataaatttcagatttttaacatgttagtatttggccaaaggaaatgagcaattttaggccaactgctgttttattaacaaaaatatgccctaaggaaattgactgctttaagacatcactgtattttatcacagaaactggacagtgcctggcacatagctagtacccaatattagttggactgaatactttgaaaagtcagcagtctctactaaaaatacaaaaattagccaggtatggtggtgtagtgcatacctgtaatcccagctactccggaggctgaggcaagagaatcacttgaacccaggaggcggaggttgcagtgagccaagatcgcgccattgcactccagcctgggtgacatagtgaaactctgtctcaaaaaaaaaaaagaaaaaagaaaaaaaagaaaagtcaacagactttaccaacccccagaatttaaaagctacgtatctcatagcattgcttatagattacatgagacaacgcatgtgatatacttagcacagtgccgcctgtcatatggtaagctcccaataaatgtcagctgacttttttttcttttttttgagacagggtctcactctgtcaccaaggctgaagtgaagtggcataattataactcgctgcagcctcaacctcctgggctcaagtgattctcctacctcagcctccaaaaatgctgagagtataggcacaagccaccacactcagcctcagttggcattattgatatgaaatactatttccaatcttgcagtgcttacatcatctttggcttattacatggtatttcttccaaacagttacaaatatcaattgcaatgggaaacacatctctagctatatttcacctacccagaattctctagaatcctactgaaaatgtctccagaaaccaacaagtttccattgctgaggttttctagaaggtccagcagtgtgggtaacagggagtggcaccctaagatcaaagctctcggcagccttgacctaggacagatgccacagaggaataaaatgtcaagagaattcaactttttccagggctacagcttttctctttatgctccttttctatattttcatccattttctcatgtggaactggagtgtaccttatcttaagataccaagtgtctgacagccacatgttctgaggatgtctggtctcccaaaggtcagaatccaaaatcaaagaactaatcattatattcctacggggatctttaaccattttctaactacagaacatgttccaagaactgactggaaaacattttctgaactgtttcttgaggttcccaaatgatcagtgtattttaatgtaaaatcaatatatatttggggaggtaaaaaaacaatgtttaaaacatgtccgtttgagaaatggacagtagaataggaatccacttaagagggagaccgtcaagtggacaggagacaaatttcggtgatataattgtttatcttgttcaccgtcaaaatatctggttgaaagtactgggttcaaaatacctttattaggaagaattaagcacactccaatttattcatccattctttcattaaaaaaccattttctgggcatttcctgaatccacagcactatcccgtgcaaaaaaggggaatgaaggatcaaaagacatgatctcttccctctacacactcacaatccagttaagcctattacatgatattgtgcattatgagtaggaactatgcgactccacgttaaggatgctaaatattcactttattccagatggcttccctgttatgttgtcatgaggcatgtggcacaagcgtcatcgtaggggtacctcctgcttcccagaacctctcaataaaccctatgctgctactgactggacgcacctggaagggggctgtttatggtggtatgtagttgggctcaagtgccaaattctcattaatctcaatatatctcattaatctcaatataatctcaatatatatgcccttttacaattgacaaggcaagattttgaaaacaaatcaaaaataaatttaaattccttttctatctacagtctccaaatcaactagatatggaactaatgcagacagaaggtcccaatatagacttttttctgttgtcaccataacccaggacctttaatctccatctgtttttgtacttgtgactgtgtaaggcatggaaatttttagtagaacatgcaaatctacaacaatatttcatatctacacccaaatttagacaactgataaatttgctcctctaccttgggcataaacttctgtactattatttctatgggagagacaaaataactaagaaccttcgtttatctgtgattttttttaagtcaagacactgtaaaagcatattgaagtactgtatctcttcttatcctcagttatagcagtctggaatggagcaccttttctaaactttgatttatttggaaaatcttctcttcaattctcctacttaccctagctgaatccaacaatgatactgtcttcttttcaggctttaagagtaaagaaggtatcccaaaacttgtggctgattttatggctaagaagttttcactggatgcgttaataacccatgttttaccttttgaaaaaataaatgaaggatttgacctgcttcactctgggaaaaggtagattttaagttagttttctgttttgcttttttttctaccataggggattgtctagcagagaatgaaaaaggtggaaagatgagaaaatatagagtcccttggttttccattaccagttcagtctttgcatggagcgtatgtaggatcatactgtgagaagttgaaaacagttgctttgcatttcctattctgctggagtcaaattacgttgattactgcaaatctgaatgatcagagccactcagccttcctgaaaagagaacactcacatttgcccaaaaaaaaccccacaaaaaaacaaaagtctatttaaacagccataattataacatggtgtctttgaagcctcttccttctacctatataaagctgacactaagtgtctgcatatttaaataattttcaggacatcctcaacattttcattacaggagtaggtggaactacattgggattgttttctaggtagatattactagtttttctctttttctttttcttttgtagtttaagaaaaaattttttaccactgaaagttatcataaaagagtagtaaatactattttaaatgtttgtcttacattttctctgaagcttagaaaaataagccaattctatttcctacctctaacatttaacacttacaaccagctattaaaatgaattttgtcacctgcatttacatgaggcacaactggaaacaggcagttatatctaacctttgccttctagctccagagtcttagattcttctgctatcccacacttactttcatgaggttttcaactttaaatagtgtttctttggcactcacaaaatcattatactaggtactttaaccgacaacattcttgaggaaggaaagaaactagcacccaccgagcaccagctgttctattaagtgtcttacctgcattatctcctgtgattcccaaacaatgctcagtgtcagtctcaatctcactatcttagagaacagaaactgagactcggagaagacatgactttgccaaaatcatcaagtggtaggaaggggaggcagaattcaaaagtagatcttgtttttagcaaatcgattcactttctattaaaccacaccgcccctcaagagtgcatgtacatatggaaaacagtagtcatcaaaggttagttatcagtcattattattaccattgacatcatcattgggatcatcatcatcataggattgaaaagatgatggcaaatatagagatgaacaaaaccagaggacagtgttgagcaacataagaagtcatgaagcatgcctaaattcactttatgagaatgtcatatagtaatatgcatatgtaaatataattaatcctatcaataagcaaagattaaaaattataatattcaatattggtaagaataaggtgagttgggcactttcatgtactttcagtagtaattgatacatacttttggaaaagcaatttggtaatatatatcagaaacctttaaaaaataactgaatcctttgccccagcaattccatttctagaaatctattctacagaaataatcaactagtcaaacatgcatatatgtttacttgttagaactttagaaacattctaaagttcaacacaaggaaaataatttcataaattccagtcatctattagaaataaatgaaaccatcaaaaagaaatgacttcattgggatattctcatgatgtaattttagactcatttaatgaagaatataaattgtatatgttgtatatgcaatgtctcaaattttctttttttatatttattttattattattatactttaagttttagggtacatgtgcacaatgtgcaggttagttacatatgtatacatgtgccatgctggtgtgctgcacccattaactcgtcatcaaaaacagtaaaacatgcacagatttctagaaaaaagttcatagaaattcaagaaaacattgagaatgattatttctaggttgtgggattatggatttcttttactttcttcttcctgctgtcttgtattctctgaattatgtgcatatatatttctcatatatgcatatgcatatacatatatatgttaaaaattattaaagagtcacaaagaccatcattttctaaaaatatgtattcatgagaagttggtttatagaaagggcattagttctagtgtaaatgttccatttgtaatcttcacaagaatgaactatcttagaattaatacaaatcaactttattctctacttctacaaatccttaaacatccgtatcaaaggtcttttaaacttccagcatagtcttaactttgttaaattatcaattctttcaggcaagttatccatcatcttataatttttgcaaatttgtatttgggtttgaatcccaacactccatactagatgtgctaccagagcaagttacaaatctttctaagtctcagtttttataatctctaaaatggacataatatgggaacctacctcttagtgttgatgtttaggttgaagtttaagaaaatgcacgaagaatgtgacaaatagtaagaacttactgcaagttattatccactgttgttttatattccttattataccaggaacgtgggcacacaaaaatgattttttgaagatgctaatgtagaattaatgtagaattgaaatgacaggcatactcaggatgttgtgagtgagattaagattggagaaaaaaagaaaagaaaagaaaaccaaaaaagatgaacttcctttttcttgaaccaaatgtatggggatggaaatagggtagctgggatcacagacagattttcactaagacacctcagatgctccttggactctcacaacaagcatgtgggttgtctaaatgttaacacaatgtctcttctttcctattgcagtatccgtaccgtcctgacgttttgaggcaatagagatgccttcccctgtagcagtcttcagcctcctctaccctacaagatctggagcaacagctaggaaatatcattaattcagctcttcagagatgttatcaataaattacacatgggggctttccaaagaaatggaaattgatgggaaattatttttcaggaaaatttaaaattcaagtgagaagtaaataaagtgttgaacatcagctggggaattgaagccaacaaaccttccttcttaaccattctactgtgtcacctttgccattgaggaaaaatattcctgtgacttcttgcatttttggtatcttcataatctttagtcatcgaatcccagtggaggggacccttttacttgccctgaacatacacatgctgggccattgtgattgaagtcttctaactctgtctcagttttcactgtcgacattttcctttttctaataaaaatgtaccaaatccctggggtaaaagctagggtaaggtaaaggatagactcacatttacaagtagtgaaggtccaagagttctaaatacaggaaatttcttaggaactcaaataaaatgccccacattttactacagtaaatggcagtgtttttatgacttttatactatttctttatggtcgatatacaattgattttttaaaataatagcagatttcttgcttcatatgacaaagcctcaattactaattgtaaaaactgaactattcccagaatcatgttcaaaaaatctgtaatttttgctgatgaaagtgcttcattgactaaacagtattagtttgtggctataaatgattatttagatgatgactgaaaatgtgtataaagtaattaaaagtaatatggtggctttaagtgtagagatgggatggcaaatgctgtgaatgcagaatgtaaaattggtaactaagaaatggcacaaacaccttaagcaatatattttcctagtagatatatatatacacatacatatatacacatatacaaatgtatatttttgcaaaattgttttcaatctagaacttttctattaactaccatgtcttaaaatcaagtctataatcctagcattagtttaatattttgaatatgtaaagacctgtgttaatgctttgttaatgcttttcccactctcatttgttaatgctttcccactctcaggggaaggatttgcattttgagctttatctctaaatgtgacatgcaaagattattcctggtaaaggaggtagctgtctccaaaaatgctattgttgcaatatctacattctatttcatattatgaaagaccttagacataaagtaaaatagtttatcatttactgtgtgatcttcagtaagtctctcaggctctctgagcttgttcatcctttgttttgaaaaaattactcaaccaatccattacagcttaaccaagattaaatgggatgatgttaatgaaagagcttcgccaattaagaagggccatgtaaatgtgggtaacctgattgttttgtcaaaaatgctaaagcggggtggggggtggcgcagtggcttatccctgtaatcccagcactttgggaggtcaagacgggtggatgacctgaggtcaggagtttgagaccagcctggtcaacatggtgaaaccccatctctactaaaaatacaaaaatttgccaggcatggtggcaggtggctgtaatcccagctactcaggaggctgaggcaagagaatcgctggagcctgggaggcggaggttgcagtgagcagaaatcttgccactgcacagcagcctaggcgacaagagcaaaactctgtcaaaagaaaagaaaagaaaatgctgaaggagttactcagggtcaagaaagttttcagaatgtccgtaagataacatcatcatgggacactacctgttgctgggtgctctgcggcttttacactgatgctgattgtgtgagatccagaaaaagaaaatggagttctacatgcccatctcacagcagggtcatcaaatcctgctagtgacacagaagctgacatccagctcccacccgccttcctcccaggttcggggagcaggtagagtgggagccattaggtgggctctgccagtgttgtcatagagtggcaagtcctccatgggatgggagtggcatgtgggagccttctgcatcatgcactatgaaaaaagaaaatttactatggggcaagtggttcatatagttaagtgattgtatatatatatatatatatatatatatatatatatatatatatatatacactatggggcaagtggttcatatagttaagtgattgtatatatatatatatatatatatgtattccagtgtagaaagtattggctgggtctgtaatcaagtattccacagaagtgccttcataggtgctgaaacaggattatgagagtgacagacacaggactgaagacagggagaaaatgtgcatggctgtgagaatatattgctttgattctttgacttctcatgatatatgaaaacaaataaagtgggggggggtgacttcaataatatcacgaacatatttaaaatgaaattctgagcatggagaaaaatttcaaattctggtataaacaaataatctaaaaatatagataaggaaaaaatgttttcatttttttggtcatattgatttgggtcatatatgattgaccaaaaaaaaagatatttctaaaatcctggtgctttttcatttaaaaatagacaaccaaagaggaaaatgaacaatgatggaaattcgtggaagaggaaactaaaatggcaaaatagcatattaaatggcactgagccttggtgtgatcaaaaaaaaaaataaagcaaaatgagatattactgctta

SEQ ID NO: 171 - DNA, 1986 bp, Homo sapiens
gcttgactccgccctctctccctctgcccgctttcaataagaggcagagacagcagccagaggaaccgagaggctgagactaacccagaaacatccaattctcaaactgaagctcgcactctcgcctccagcatgaaagtctctgccgcccttctgtgcctgctgctcatagcagccaccttcattccccaagggctcgctcagccaggtaaggccccctcttcttctccttgaaccacattgtcttctctctgagttatcatggaccatccaagcagacgtggtacccacagtcttgctttaacgctacttttccaagataaggtgactcagaaaaggacaaggggtgagcccaaccacacagctgctgctcggcagagcctgaactagaattccagctgtgaaccccaaatccagctccttccaggattccagctctgggaacacactcagcgcagttactcccccagctgcttccagcagagtttggggatcagggtaatcaaagagagggtgggtgtgtaggctgtttccagacacgctggagacccagaatctggtctgtgcttcattcaccttagcttccagagacggtgactctgcagaggtaatgagtatcagggaaactcatgaccaggcatagcctattcagagtctaaaaggaggctcatagtggggctccccagctgatcttccctggtgctgatcatctggattattggtccgtcttaatgacacttgtaggcattatctagctttaacagctcctccttctctctgtccattatcaatgttatatacccattttacagcataggaaactgagtcattgggtcaaagatcacattctagctctgaggtataggcagaagcactgggatttaatgagctctttgtcttctcctgcctgccttttgctttttcctcatgactcttttctgctcttaagatcagaataatccagttcatcctaaaatgctttttctttgtggtttattttccagatgcaatcaatgccccagtcacctgctgttataacttcaccaataggaagatctcagtgcagaggctcgcgagctatagaagaatcaccagcagcaagtgtcccaaagaagctgtgatgtgagttcagcacaccaaccttccctggcctgaagttcttccttgtggagcaagggacaagcctcataaacctagagtcagagagtgcactatttaacttaatgtacaaaggttcccaatgggaaaactgaggcaccaagggaaaaagtgaaccccaacatcactctccacctgggtgcctattcagaacaccccaatttctttagcttgaagtcaggatggctccacctggacacctataggagcagtttgccctgggttccctccttccacctgcgttcctcctctagctcccatggcagccctttggtgcagaatgggctgcacttctagaccaaaactgcaaaggaacttcatctaactctgtcctccctccccacagcttcaagaccattgtggccaaggagatctgtgctgaccccaagcagaagtgggttcaggattccatggaccacctggacaagcaaacccaaactccgaagacttgaacactcactccacaacccaagaatctgcagctaacttattttcccctagctttccccagacaccctgttttattttattataatgaattttgtttgttgatgtgaaacattatgccttaagtaatgttaattcttatttaagttattgatgttttaagtttatctttcatggtactagtgttttttagatacagagacttggggaaattgcttttcctcttgaaccacagttctacccctgggatgttttgagggtctttgcaagaatcattaatacaaagaattttttttaacattccaatgcattgctaaaatattattgtggaaatgaatattttgtaactattacaccaaataaatatatttttgtacaaaa

SEQ ID NO: 172 - DNA, 59275 bp, Homo sapiens
gggcactgggcaggaaggggagggggagcgagcgcgagaaatgcagaggctgcagcggcggcggcggcggcagtagcggcagcggcgacgacggcggcggcagcgctccaactggctcctcgctccgggctccgccgtcgagccgggagagagcctccgccagcggccaggcaccagccagacgacgccagcgaccccggcctctcggcggcaccgcgctaactcaggggctgcataggcacccagagccggtaaggaggcgcgcccggtggccccgcgccgccgcggacccgggggcctccgtcccccaccgcgccgcgccccgccccgcagcccccgggctctcccttcatgcagcgggcagcagggatgtgggcccggattggacggcaagggcctggggtccctctgtgagggctccgtcgcacttcggggatcccgggtgatggggggcccagaagtgggaggcttcagccgctcgcatggtggaggggtgaggggggcggcgaggttggtaaacggagctggggggagggggctgtcggggagaggagctgcgggtgacgggaggaattgccgaatgcgaaaccccctcagtgcgttgagtcccggggagacggttctgtgggctgaagggagcgcttccgtcatcggagcccttaccagcctgggagaaagcgctcggggcgaggggcgcagcagccaaagatggagggtgggggtggggtggggcgggagtccggggagaaagaagatggggaatctggcccgatcagaaggaagtgggtggctttttgctttggcaaacgggttttctcgacccatgggactcctggatcttggttctggggccaaggaatacgaggttcacacggcgacgtgcactcagaagcacctcccgagcagatcggagccccagcctcgtcagtggcggaattgccttcctacgaacccgtgggctgcctcggagcagtttgttttttcgagcctttggttccaagaatgcgccaggcgcctccgccctgggtcccggccccggcccgggcccggggggtgtgggcttgaacctgacagcgcgcggccctaactgggctcagccccgctgggagcgtagggttggggttgagcagcttttgcccaaagcgctaaagctgaaacccggcgcccggttcctgctccccccgcccccgtcccccctccatttccagaaaaataaaaattgcggaatcctggatccgatcgcacgcacaatgcgcggctgcaaaccgcattcttttcatgaatattcatcgaacgcttggccaggctccttatctgcgtccccagagacatttccgccttgaaacgaactcggtggacagcccttgcccatgtaattctcactctgctgaaattagcacagcacacatgggtgcattttttaggaccttgtacaggttgacaacacctctgtctcccccgcggccactcgcactgtggggcgggctaaaacccaacactagcgtcgaaatggccttctgctatagggttgtggaccgaccccccacccccacctcccgggattacagcccgggccaacagacccccagtatactgcaggcaaaatgaatgaatcgggactgtaattacctattcctttgtcttggcctcgcgcatgcgccggagagcagggtgtggagggcccggcagccccatcccatctccatcatccagccacccactcccctcccgagccgaggaacaaaggcgtttgccctaaatgttgcgggaaacccttggacaccaatgacagtttttcccgcctgtgtgtgtgtttcttcttttccaggctgtctctcatcttttgctttcttgctgatttcaattgaccaaaattaagatttgccttgatgaggatgaaggcaaattgtggattaaatattttgtacccgcacactgttattttcctttctagtactgttcattgttctttttcctgtaacatatcttactgcagtgagggtggctttcttaatttgcatcaattaaccgtttgacagatcttttttggtcatttgattaagggaaggtggcctcaaaactgtcagtgggcgttgcctccagtgacaccacctggggaaaattaagacatcttggcgtttattcgaacaagatggcctacaaaaaccggagagaagaaaacgattaccttgtcgggatcctaaccctttctgttttctctggactccgaactcattgtttcattaaggattccaaaaggcgaatggcgtccagatggaaatctgatgggggcagaaagaaggcagtcgttggggtgaagctggttgattaggttcgcaatgattcctttttccccattacctaacagaagccatgatatacctttgatggctgattttctttcagatgatctattttccaggttatggccatttagatttattttcaggtagtttgtttttaccacacaaaaagggacttattgtgtatattaaataggagccaaatatgatattttttgcagtggtaggttatgtttaatagggttttatgcttaagtactgtcagtacatcctggtggaataacgcgtggcagcaatggaaatcatctcttttgtcctttttgatgagaacttgatattgaccacgtttaatatatcagggcccatctactggctacggtggctgtctagctgtcttctaggtggcatggattgtaccctctgtactccttagtattgagtaggttattatgatttagagagctacgttctttcttttttcttttcctttaggttgtgtttttggcgaggggtatgttggaatatagaacaaattcaatagcaaatatataccagcatgtccccaattcagtaaatcttaggtttttgagtgagataatatttaaatcgatttttaaaaattattacagaattaaaatatttctatcagttcgcttattcttttagccagctagctttttgccaagctttagcagatagagaaattgagccttttgataaaaagcaccaacaatgacagtggcatttctgttctttaactggtactcagtctgccattgtgacgtgtagaagagaaccttatctccccacatcaccctagtttaaaggtccaatgggagagccctaaacatttaggctgtctatccttggaggcctcttcataatcctggatttactaggatccataatcctcctggatcttatggtgcaagaggtgatgcgttctgtctctttattttttaatttcacaattaagaacagtttgaagccattttcatttcatggtcaagcggagtatgacatcagagagaaactttcatttggaggagatttgatcactctaaaatggatgtctgtgttatttacggtagttttgtaaaaattgcaaaatccacacccatttttaaaaacaaggtgtcatgtatatacacatgtacacatacacatacttgtttatacacactctaaaatcttatgaataacttgaaatcaaactggttggtatagaatattattttatagtgctttgatactggtctttggaacataatcaatttctgtctttctaaatatgtgtttgaaagggaaagcctagcaagtctattaataagctcacttcccatttatcccagtgtacctggagcattaagctaagacgttcatccacaggcttaaaaacttacatcaagcactactgaactttacaagctggaataaacaatgcctactaaataaaagatttataaaattgttctgtcttatttttgtgatctcttgtaaatgttttttttttttttttttttaaatatccaaagaagacctgtgaactattatttgtcagaagcaattgcccttggtatctgattctgttgaaagaaatgcgttgatttgtccagacctttatcttaatgtagtttgtacctacttatttcacatcttctttctcttcttaatgatggtcttagctggtaccctggaaaccaggtaactgctggggaaaaacactgagtagatatatagacaacttgaatattctctgaaaatgggcatggaatctttattgttatatcaaattttctctaattatatctaatcctttaaatttattgtatctcttaagacattagataagccagtgaacatgagcttttttctttggcttaattatagtggacaactattaggaaggaactgtgaggttgcaaatagaatattttgaaagataaagtactctttatgtgttttggggtaatgtttttggagtggtttctcaggaaatcgtataaagactggatttgaagaatctaataattcctattttggggttgtaataagaactacatatgatatctaaaaatgacttaagtgtggaatggctggctctgaagggctcctcaacctctcagtctcaattagtgatatcaattacactgaaagtgttttcaacaactgaaagtgtcaatcaacactttcagtgtaattgacatcactaactaatttcagtatattcagctgtatttttgttccagcttgattaatgaagcccgggggaccccaggagtattaagttagaagtaggatgtctcaatcctaaaggggaccaaatatcatggttcctattttctgtccttgtgtttgtagatatttgaaattctgtattatatgggaattagcctgaaagtggatttcatgatatcaagatggccaccttccttgaattccccaggtctgcttatacttatacttatgtaacttaagaagtggcatttaagttctcttgagaaaatacaagggtagtcttgaaaccacagcagtgcccagcctgccaaaggaaggcttttgtgaaacgcctttccagccacagcctttgaggcagacgtctaggtaagtgtcacatgagaacagatgtctggtaaatgctctcaagagtaaaaatcaaccatacagagtccatttctcaccagaatatagttcaattgtaattttgaggagccacaagcctaagaaggaagcagtgtgattaaaacagcattctccttttccctctagaagtcagaaatgggatgaaatgggaggcagagagaatgaaatagtgtgtttttcttctgcaccctaaggatttaaataacataaaaaattatttcttaatgttttacagactttccatactcagtacatttttgaacaaaaatagggaaagctgagattttttgactcaacaaggccgtcagtgctgagaggtggtgattgagcaggcttggaagtctaggaatacattcctgaaagctttagagatttagaaatagaaaccatctgcaagcaccacaggggcccagggcataaggaaacacttcaggataatataggaaaatggtgtgcagtggagaaagcaaagcatttacacaatattttccccttatcacttaagcattttataaactctttttttttttggttcgttttgaaggaggcaggactggacttcattggtttgtgttttgaacttctgtttgaagtagatatttcagcaatttgtacattgtgtagggagtataatatttagaaagcatgatttggagggttaggcatggtggggatggactttggagccacagcaccaggttcgaatcttctctcagccatttactggttgtatgatctttggtaaattgcttaccttctctgtgcctcaattttatttagaaaatgggaattgtgatacatggttactgtaagtattaaacaaaattgtcatgcacttaggacaatgcctccttatattcagtgcatctttttaaaggagtgtgaatatcagttttctttactgcatccttcatctatagctactcatatgtttgtttcaaagagaccattattgcaagacaggccaatggtggtgccttgctcagtaggtagaatatagaagtctgcggtttagaaaactcctccaggtgtggttaagaatacgctaaatacgtcagtagttcatgtggactaagtttcaaaagtgggtaggttaatacaacccagcctccatactgaatttgtactttttttaattgaaggaaaaaaatgaaagtccttggaacttcagagacaggattactgctttgatatgttgagacctggactcaccctgattagctgtatgaccttgggtgtagatgtaactcattcagattcctgaaaatccttagctttgttgtgtcttgaatcagatgtatcattagcatttgaaagaagtctaagtcattagtactaaggttgataagccaacttaggtattttacattccatattattcccactacctccaccctgcccctgccaaacaggcatcagatgcccaccgcctccatacctggagtaaaactgaaagttgtattatgtaggaatgtaaagatgttgtgatctattgacaaatctttggaaggaattatccccgtggggaccttagaaatcaggaactctgaacaacaaaacaaaaaagtctttggaatttcagctatttggggtggatcaattctggaactggtcttaacatttcagacatttacttcagggatatgcccaaggatttgcttttgtccttctggacactttgttgttgagcaaaggtgaattcactctcattttgggtaaattgttgtttaacagcttccttaaacaggtttttgtatcttacggattctggagggaagtcatatattttactctatctgtcaggtgttcactgtaaggaaggggattttagatatagtggttatgtcttttaaaaagtttcctaggatttcaatccgtgtagatggagctacactgtacttctcctaagccttggccattttatcttaggtaatatggactcttcagggggggaaaaaaggggaaggggggctcttgaataaaatgggtagccttttcacatattgacatcttcagtattaatttagagagagcgatactaacttcttcaatgaaaaattatttatggaagagatccagtgtatacttctaatatttcatcagtattacgttaaattgcttgtagattagaggtgcttcttgtcatagtgaatggagactaataccttaagtcattcctttctagtatgatgattgtggttgctcttactgaggactataaatgtggatttggttgatactttcacgtttctccttggacattgcagatggaagtcataaccccaaatgtcttacttatctgcaattttgctctgagatatggaccaggctctagcagaccgtctgccactgtgtagttagtgttgcctgattagaaataaaccaagtcctgcctaaattggtcaatctgttttgttccgcgtccacgcaggatccacttacagaaagccagtggctgcttttaaccactatcgaaacctcagtcctttgtaagtactttccttggagcagaaggtttaaaagctcatgactaaacactcattttggaactcaaaataatcttagagaagttagtgggttgctcagagtcccacgagctgcttatgggctgcgtggaaacccaggttatttccccataaagcctcactcctgctgcccctctcttctgagagagaagcagagaatgtctaattgagtcactcttactcactgtctgcaacgtaaaacttttttttctaccatttttttttgtaccctagaaccattaaaaaaaaaaccagtctggatcctatatccgtctcatgatctcccccagaggagacctcttcggccttttaatacaccacacatgccccagggggacggtgcagtcactacctgctgccacttcatccacaggccatcttcccctcaacttactcctttctgcttcttacattatgtgcacgtggtttcctttatatgccaaaaagtatatggcatgcactgaaataactttcttcataaaactaaactttagtttttctaaaatttaagttaaatccttgtttttctcccaaaatgcacagtggttgggggctgggaagctggcgatggtgggtatgtgtttgaaaagaacgccagctggctttagacttatttgggggctatagagcaagcggagcagtcaggcatcccacccacccctgaaatgctcggggccctcttggcagatccagtgtgcacgttgtcgtggcaggtggtggatggagagcttttatgccgatttctagcgttatctggcttattggtttgagagctgcatacaacgggatgtttaatcttttttatttaaaattaccatttatagtatttggggtgatttagaggatttaaaaaatctgttagattctgaagtagtccttaaaatatggaacataagtgcttaagatgctaaaacactttctaaagcatactattgggatgtttgaaactgatgttggtaaatgtaaactgtgtgcatttgtgtttggataatctgtgataagtttagtttttgatgagacacaattttaatttcacatttaaaatgacatattgaggtcaataagagcaggtttgaatttacattttccagagaaacccacaattaataggtaacttttattttcataatgcttttaattattacacttacgtagattcagaaatggatatattcctaaaataaaccaaaattaaaacttctttgtctttttaaagaaaagctgtggttctattagagaaaaatacttcttttttaagtttatgaagaaatagctgttagataaaaacttttcctggttgagctttctaaattacaaatttcctgaattgcatggcaaagtgactttgaaaagacccacttcatttttcctttgacagtctattcaaaacaccattaccacgtagactaatacaataaccaaggtaaatagtaacaagatctaatgggggaaatagtgtatcaaaagggggaaaacagtatccactgacagagagaactagctgtttcttaaagagacagagaagaaaggtttcctcggagttattgggtcttcataggatggtctcctgtccttctctgagcttgccttggaaactgtagaggctgtaggaatatttgctgtctttaacccttactaatgttctcagctatttcattagaggatcacagtgtctgtatttgccttaggtgtaagatgattggagaaaaggaaaatgtagagaaatcagattgactttagatggacaggcagagagttctggagtgacttcccactccttaattctgcaatgcacccagaaggcagggtgaggttagatgatcacctgggtatttactatagccattattactgtgattagataaagtgtcctggaatcttctctgaataactcatttttcttttttttttttttctttttttcgttttgctctgtcgcccaggctggagtgcagtggcgcaatctcagctcactgcaacctcagcctcctgggttcaagcgattctcctgcctcagcctcccgagtagctgggattactggcacccgccaccatgcccagctaattttttcgtatttttagtagagacaaggtttcaccatgttggtcaggctggtcttgaactcctgacttcgtgatccacctgtcttggcctcccaaagtgctaggattacaggtgtgagccaccgcacccgtccttttttctttttagacagtctcactctgtcgcccaggctggagtgcagtggcgcaatttctgctcaccacaacctctgcctcctgggttcaagcaattctcgtgcctcagcctccctagtagctgggactacaggtgtacgccaccaagcttgactaatttttatatatatatatatatacaatattttttttgacagagtctcgccgtgtcgcccaggctggagtgcagtggcacgatctcggctcactgcaacctccgcctcccaggttcaagcaattcttttgccccagcctccaaagtagctgggcctacaggtgccgccactatgcccggctaatttttttgtattttttagtagagatggggtttcactatattggccaggctggtcacaaactcctaacctcaagtgatctgctctccttggcctcccaaagtgctgggattacaggcgtgagccaccatgcccggccaataactcatttttctaaggaagaaagaatctcgattaacaattggtgatgacagtgcctccaaaggcttctcataatcacccaacctcaggtaaacagggtgaatgccaccctattgacaggaggtttattgtggcactgggttttgctcagtagccctggtgatctgttgttgagaacccaagctcatatttcccaaggctcacccaactggactttagaaacctggttccagaattttcaaatgtttggttttcaggcagatagtaacaagtgtttgtaccaatgttctccagaaggttgttaagacaagattgataatgcttcccaggtatgtgtttctttttctgactcacagctgcatgttactagttttcctcatctgacccgatgattgactgatggaaagtctcattgaaggtttggttatcctttcattggtagaagagacaaaaacaggacataagtggcttattccattcacctctacttttctattgtaactggatttatttctgccatccagacagagagcctgggctttgatttcatctgtaccaaagttttctgggtggacaggtacagggggtcatcgtaagagaactcaactgaccacaatgcagagagaggtaactatccaatggaatggtaacatggttccactacggtaagaactgtagtgttaaatgaaatgaattcttaatgggaaaggagtcctatgaatatttctaagttgttatgtttaacttaactaactcttaaatgcagggaatttaacttaaaagtgaatttaacaaagaagtgaatttaaaagccaacaagcttcatatctctccacctcaccccaaacccgtgttaattagcccttcttgcttaaatcaaatcaccttgttgaaatttaatgctgtgactagcaatgtattctttgaccatatccttgtttccagcaacaaatactgccacgttaaggggagaaggaagtgatggatagagggaccagttggcagattgggacacacgtacaaacactattcctttaacttgctttctttagatccgtagttcctacctgtgagtctcatttctgtattgatccgcattggctaagcatacgactaaagcgggattctttgtcttttcttcagtgagctagccaggaatctcagaaaaagggcaaagaagtccagaatgatgtaatgctgcaaaaaatgttactgctgtttctaaggggagtggaagaaacccaagccagttttgagttgagtgtgcttcctgttggaagggggtgagaattcagagatgtatacctattaaaaaaaaaacaaaactcttaggatatcacacagcgtggcaaaccagcaagccctgacctgttagcagttgtttgcatagtttaccaggtagagaaagcatccacagatagaatcaaatgtttgaggacactaacgtgcactgtggttagtgtgaggtttaactggctggggacacatttccacttaaatctgattctgataacacatttaactacttccctagctaattacacagttccaggcttgagagaggaaaaggcacctgtgagcagtggcatgtcttgttaaataaggtttgaaaacccttccgaaaaggaagaaatggctgtacttggggacgtttgagcatagtaattgtgcagccttgctcctggctgaggggaggggaaagaaagcccttggtttctgctccaagaagtgttcaaattccccttatgtgggcagaatttttggtaagtacaatacaggaagcaaaactgcattgttctaggtcagcagtcaatgacctattgtttctgagcccctctgttccctcctcactttgtgttcaggggacgaaagcccagagcaggagaagaggaagggaagtctgggagaggctgggaagatgcacccgcattaacacaagttggagaggcaccaatgctctcctcctgtgtctactcaggctgccataacaaaataacagatgggataacttaacaaaaatatattttttcatagttctgcaggctggaagtccaagatcaacatgttggtaggattgggtttttttttttttttttttgatggagtcttgctctgtcacccaggctggagtgcagtggcactatcttggctcactgcaacctctgcctcccgggttcaagcagttctctgcctcagcctcccaagtagctgggattataggcgtgtgccaccacgcccagctaatttttttgtatttttagtagagatagggtttcaccatcttggccaggctggtcttgaactccaaagtgctgggattacaggcatgagctaccgcacctggcccagacttgagttttctaaatcagaatggaatgatcctggggaagctcattttaaaatctcctacccagagtggcaatggtagagagcccttcttgttctagacagaagagttgaccagatgcctaggccactttaaaatcctattctagcatctgtgctttcttttagggattcattagacagactcttaacggtggaacagattttactggatagagacttggggttgaagacagaaggcaggggcttgaatagaagcaagtgcaggaagagtggtgggggttttgacagaaagtttatgaatcagtgggacaccgaggaaagggaagtgtgtgtcgggaatcatggaaatcctccatgactatagaaaccaaggctaatgaattttggggcctttccaagcaataaaacaagtagtgatacttacagggattcttttgaggggcattctcaacaagtgtgggtgtgggtaagtctacacttaacccttttgagagggtcctttttattattatttcattttattttattttttgagacaggggctcgctctgtgatgcaggctgcagtggtgtgatctcatctcactgcaacctccgcctcccgagttcaagcgattctcctgcctcagcctcccaagtaggtgggattacaggtgtgtgccaccatgcctggctaatttttgtcttttgttttaggggagatggggtttcgtcatgttggccaggctggtctccaactcctgacctcaaatgatccacccgccttggcctcccaaagtgctgggattacaggccactgcgcccagcccgagagggtctttttaaaacagtttacgacttttaggcgtaccctgtcaagtaattcagttattgctttcctggctcaaatttaaggtcacattacgttaactctggcaatacaaatattgcctcatgaatccccagtgaaattgagaattaacaatttaattttactacactagataaacaaaccactggtcttaaaaataattgaaacgatgctgtttaatgtcttttataacaactttcactgaattgttttctacataaaacataggatgtaagttattgtagaatttaaaaattttaactcttaaaatttatgcagtgtctattttcaatgcaatgtcagtgaggacctttagcactcactttcctggtagatagcaccttcttccaatcatgccagaaaactaggcttgtctcctggaattccccatatggcctccttcctgggtagtgaaactcacatatgtccatttccctctacttgaagccattaatctagtggaagcttctattctctcctggatcactgccctaatactctcctaaatccaagcatgacattcctctgcttaagattttaggcctaactctccattaaacctggaataaaacaccggctctcagcatgttcaccttctattttcgtctcttacctccgttcctacacactctctcacccaccctcttcagccataccaacaggctcccaggtctcccagggctccaagctcatgcctactgctttttctgcctggaatattcttttccccactgttgaagttactcctagttcagatctcagcttaaatgtcactcttgcaaagatgttcccacacctcctggcactgggcatttttgtccctgcatttgccagaattgatgagattatgtaacgtctctgctcctctagattaaaacatccaggaggcagggatgtgtctgttttgtggacccataacagtgccctataacaatttctgatccataccaagcaccccatgtctgttcagtgttgaaggttgtctacagtacattatgttcatggagagcacgtgtcttctgaacatcgcctttggcagctgagatgacttccataaatgggccaaaatttcacctcatcagttgtgcttactatgaagatgaatagctgatgaactccaattacagtaattattctgtttccaggcaataaccttagcagtagttgttctaaagccctgagacattacaagtaatgagtactgatggctcatgcatctgagtgtcctcccaaggtagagtccgaaatgaaaaatgaagctgtgtattatttgagggagacaaatagtattacattgtgggaacctttcagaaacacaacacgatgagtgaaagctgaggatgattgtggttacactcctcgtctgtccttccaggttattgaatgcttttggtctgctttggatcaatcattattgaacaacttaactgaatgcattttagtaacagcctttgtgaagctgcgaacatcaggtccctagaaaagcaggtggcttgaaatctttacacattagtcaattataaacctaatgaagtaaaaacgaatttagctctaattctgcgctgtgactacttactctgcatcgtgagttctacgaggttaggaccttgctttgttcatctttggatgtcagtttctagcacctaaccgaacctgtggtccagtaaagggctggatacgtggaagggcatgtttcatggtcatgtgacatcatgctgtgcaaataaggcacatttcagaacgctgtcctttactttcacatccaggaaccagcttgtaacgaacctttggcaaacatcaccgtggatttttctttttcttttttttttggaggaggaggtggggcacaactaagacatcatttgtgatttactccccctcctcttccatgtcacatacctcttagatggtcaacattcaccttctgctgtctcatttctgagacatgagacagccatcggacttagttttaactaggattattagaaatatttttgtgtccatcttgagatctctcatcagatcaatgtctagttttcttttgctgattcttattgatggaattcttattaaataaaaaagtttgtagcttttcacaatggtatgaaattgatttctaaagtaatctgtagttaaataataatgcaagattccagtaagcatgtctagttctagcaatacaatttactcattccaaaacatttctggatgttgatcctttatttgcaaaatttttattttcataggcttctggtttgcatattaaaactatagttgtagttgaggtgatggtaggcgtctttattgtctatacctgtgagctgggttgaaatataagatattctcataccatctctataatctatgccataaacacttggcactttattaaatcaatacttggtctgaagattgtctcattttaaatgaattcagctcatgaattggccagtggcatcctcttcagctgaaactcctatatctccttccccttctttgtgttcctcccctaacatacagctgatactccctgggtaagatctgaaggagctggctgtgggtcatctagtccagaaggccatgtcagtgttatttaaatcaggtagtagaatgggaagggcagtttgcaattaattttttatcttaatgtttcgagtctctagtgcaccatactgcctcctggtttctcacagacctactgtatgttttgtttggaagccttggctcatcttgtgggttgtgtacttagctggaatgacatggtatcgatggttgaggagcaatttatgacacagatgagtaattaggtgactgatacgccttttgatgtgtgtttccaagtagatgatattttcttttctttgttttttttttttcaacattctgatatgatttgctagtgatggtgatggtgtcattttggtttcaaaactggaaaatacaggccgggcgcagtggctcacgcctgtaatgccagcactttgggaggccgaggcggacagattgcctgagttcaggagttctataccagcctggctaacatagtgaaaccccatctctactaaaaatacaaaaaaattagctgggcgtggtggcacacgcctgttgtctcagctactggggaggctgaggcagtagaattgcttcaacccaggaggtggaggttgtagtgagttgagatcgcgccactgcactccagcctgcacgacagagtgagactcagtctcaaaaacaaacaaacaaacaaaacaaacaaaaaacaatactggaaaatacaaacaagcccaaggagtgattggtagatgtttagagtctaccatttctcgacttcaggaaatgtctgtgtgtatctcagtcttctgctattgtaggcacacatcatacttcaactgtatgaagattattctattcctgctctataaatatgttattggattggatgagcaagatatacacttacacatttgaagccgtaagtaaaaaaaaaaattatatagttaaaaggtacaaataattgcttttgtgatgaatttgttctttaaatgaaacatcagtggcatttgttcatgtagttctcagataaaacttcctaaaagtggttcaagtgatttcaaaatgccaagaatatgttgcaaacttgtttttttgtatacaaatgaacagctgacatgaggtttttctaccatgtgaatgtgacgtgggaacatacaaaccacactaaaatattgcagaattgatgtttgtttattgatggagttgggagacgcatctcctttaagtagcttacagtgggtgaaggcaaacaaggaaatcagtaattacagcgaagcaaatgttggtccgtagatacatggggtagagatataaacagcagatagtcattaagtttactactccgatcaattatattctttttcttcaatctgtccctagatccacctcttttgcctgactaagccatgtgagatattccagtgagatattcaattggctattatttaaagagttttatgtgaatatcactgtagagaatatggaagaattcagcatcgattacatttagtttaaaggtcttaatcactagatagaaaagagatttacacatcttaaatttccattaaaaagcaggcatttggggattagaaactgaaggaaaagatttccaagagtagctagttcttaaaacacagtaagaatatgctttagctcttgaacacagtgtttgtagttactgtcagactccttggggaagtgtcttctgctggggctctcacctgacaggctaactgcattaagatgggccactcagcttgagaaacaggaagaattgctgttgctcccgtctgctatttatgtttttcttttttttttttttgagactgagtctcactctgtcacccaggctggagtgcagtggtgcgatcttggctcactgaaagcttcatctcccaggttcacgccattctcctgcctcagcctcccgagtagctgggattacaggtgcccgccaccaggccgggctaattttttttgtatttttagtagagacggggtttcaccgtgttagccaggatggtctcgatctcatgacctcatgatcagcccacctcggcctcccaaagtgctaggattacaggcgtgagccaccacgcctggcctgctctttatgttttttcatatgaattacatttccttacatccctattcagatgtcgacgttacttttgctcaaaagtgctcctttctcttgactcctgagttgcaaatagcttaccaaggtagctgggactcttgaccatgatgttttttaaaatgaaatctgtcaacaaatgaaagacaggattggtaactagtattttatcattcctccagccttcatcctccagcttgatttatactaaccaccatctgaaattgatgattgtttcccatgaccccacagggagattccttggatgtaggaactctgcctgatttttgttttcctagaccttcagacactacttggcccagagtaattgctctttatgaatcactgctttagtccaagcttgtccagttctctgcccaggactgctttgaatgtggcccaacaccagtttgcaaactttcttaaaacatgagacttttttttttcttttttagctcattagctattgttagcgtattttatgtgtggcccaagacaattcttccagtgtggcccagggaagccaaaagattggacacccccacccttgcgtttagtctttaagactattctaccttgggggagaaaagcaaaaatgatttcttattacacgtatttaaaccagtatttacatttgtagggatcttgggcaggttatccagagagcgagtttcttttcttttttttgggatggagtttcactcttgttgcccaggctggagtgtaatggcgtgatctcggctcactgtggcctctgcctcccgggttcaagcaattctcctgcctcagcctctggagtagctgggattacaggcacctgccaccatgcctggctaattttttgtatttttagtagagacggggtttcgccttgttggtcaggctggtctcaaactcctgaccttaggtgatccgcctgcctctgcctcccaaagtgctgggattacaggcgtgagccaccgcgctcggccgagagctagtttcctgattgataaaatgttcactgtttgttcatatcctctcctgtgtagttagatggctactgaatatatcctgagagcaggtcctaagagtttatttttcatgttattgttggaaataaaaacccagaaatattttaataataggaattaaagatatgaagaccctgatatctgaaagctgagtggttcaaatatggtgagcaatgcactcttaactagacccatatcttaagggaaaaaaatgtttttagtacttttcttggtatcttctaatcttcagaaaaaaattcttaataggcagtcgatgtaaataaaacaaaattctgtatatttaaaaagctgcttgcgctactgtgtcattcctctggaattttcaaaagctgagatttttctgtatactttgaaagctaatgaaatctaccagcccaccgggtagtaaacaaccaagaattcttgatggaggtattgtaaagaaaggtgataaggtggctgggcatggtggctcacgcctgtaattgcagcactttgggaggtcgaggtgggcggatcacgaggttaggagatccagaccatcctggctaacacgtgaaaacctgtctctactaaaaatacaaaaaattagctgggcgtggtggtgggcgcctgtagtcccagctacttgggaggctgaggcaggagaatggcgtgaacccgggaggcggagcttgcagtgagccgagatcgcaccactgcactccagcctgggcgacacagcgagactccgtctcaaaacaaaacaaaacaaaaaaaagaaagaaaggtgataaggctatctaatgaaggacccaaagaactctcactgagctcacccagaatgcttttctggattaaagcacagactgagaacctgttcttaacattagtgacttcggtatggctcattttgaagaaagaaaattgcctaaatctatagttgagcttgcacacattacaggtctctggaaataagatgcttaaacaggttctataatctggttcttgctaggtgagtgtcccctgacattgcttttttttttttttttccgtgatggagtctcgctctgccactcaggctgtagtgcagtggctcactgtaacctccacctcttgggttcaagtgaatctcctgcctccacctcccgagtagctgggactacaggcatgcaccaccatgcctggctaatttttgaatttttagtagagacagtgtttcaccatgttggccaggcttgtcttgaattcctcacctcaagtgatccacccacgtcggcctcccaaagtgctgggattacaggcatgagccactgtgtccggccccctgacattgctttctaaagtaagattacctgtagttctcagtgttcgccaagcatgtatgaaacacaacgtatgttaagaggctgtttaattacataaatgcttatttgggggattcttgttctcagtggccttctctcttttggatggatatacacagtttgattggcactcctattgacactttatttggtttgtgacttgtttgtctcggtgcctttctattaatatattttttctatttaaactaccctctttttttcagtacagcactggacattttctttgaaatcttccagattcatttggttgtcttcctcatctcagctgtcttatgcaggaaaagtggtcactgttcagtcaattcattctacgtagctggctatctgagttttttttttatcgaaaccaaaataaaacttaaaagaaacagaagaagctgagtctccctcccctccctttcaactaacacctactgatgtttatcttggaaataatttgacgtctatttgatgaaacctgtagttaagtgttaatggagactaacgtcaagcttcagaacagtgaggagaaacctttagtattgtgtgtctagcatttgatgcaagtgctctgtggaaaccatggaagctgggataaaaatgctcgcctgatccccagatagtctcatctgaatgtactgaggcatcaccgcattcattccaaatctgaacctgacctacttttccccttcatctcctgccatctcttccctagtttgtcatcttcttttccagcaccacgaatggttcatgctttctgataaatatctgatgtatggcatcaattatatgactatttaaacatgactcatagtgaactgtatttaaatattgatatgactccatgcgttttcaaagaatgtgtggaatgttctttttgagtgtcagttattaatcatctgttttccgttcaactttggttatcttcagtaaattttaatatctttcccttcaagaggacttcccagctgtctgatcaacgggtaggaaaggacagttggttcagtgcttgctcatgttagccctgtaagaagtcagctcagtttagttcatccaatagctggggaataaaaccacacaattcccttccttacttgatatcaatcaacacttgactaaatcttacatcctgtcttcagctgttttttttttcttttttgagatggagtctcgctctgtcacccaggctggagtgcagtggcatgatctcagctcactgcaacctctgcctcccgggttcaagtgattctcctgcctcagcctcctgagtagctgggactacaggtgcccgccaccatatctggctaattttttgtattttcagtagagacggggtttcaccatgttagccaggatggtctcgatctcctgaccttgtgatccgcccgcctcagcctcccaaagtgcggggattacaggtgtgagccactgcacccggcccagctctttcgtaaagaaagccttggcaaatgtggaaattctccctattcactacggtaaataattcttgaggttactaaactcagtatctaaataaaacagatcagtgtgttagtacatggaacagaaggccatatttttggttataaccgttgaccccacactcaccctggggtcttggtgtcaatgtcaggatgtgtttaaataccctaggctgtcaatcttgtaatacaactttggttatctttgttctagagccttgcaaagtaaagctgatcctagttaggacccagttaggaatttggatatatgtgttgtatttgcatgtgatactgcccttcatttgaaaacacaggcttaaattagtgaagtagaactcttttagtccagattacccccaaaatctgtgaatttgtactaattcaaaatcctctttgctggtaaccgttgtaatgaggtctttggaaattttatcctggtagcatggaggtgttgcttcttttcatttgtctagttttgtagtcagaactgtttatagagatgtaattttaaagtgaccctatgctatggtttgaatatatgtgttccaccaaaattcctacgttggaacctaatgcccagtgtgatggtattaagtaagagctggggccttttgggaaatgtcgaggtcatgattattccaccttcactaatgggattagtgctcttatagaacatgttgggaaaaaaataaaaataaagataaataaataaataaataaataaataaataaataacaggttggagcccaggagtttgaagctggggtgagccgtgatcatgccactgcactccatcctgggcaacagagtgaggctctggccgggcatggtggctcacgcctgtaatcccagcactttggtaggccgatgtaggcagatcacctgaggtcagaagtttgaaaccagcctggccaacatggtgaaatcctgtctctactgaaaaatacaaaaattagctgggcgtggtggcgggcacctgtgattgcagctcctcaggaggctgaggcaggagaatcacttgaatctgggaggcagaggttgaagtgagctgagattgcgccattgcacttcagcctgggtgacagagtgagactcctctcaataaaataaagtaaaataaaataataaaataaaaaacagagtgaggttctgactctttaaaaaaagagaaataatgtgcccacttcatcagcacatatactaaaattggaaccatatagagatgaacatggctgctatgcaagaatgacagtgcaaatttgtgaagcattccatatattttggaaaataaaaaagttgaagggagtgccctagtccccttttgtctttgatcttggacttcccaacctacagaactgtgagaagtaagtattgattctttataaattacccaatctaaggtattttgttagggtacctactaaacaaaaagataaaactcttgtgattttgatcttaagttggaaacataaaaccatcgttacagagaaggcaaaactaggcaaagatttatttttgcaatggcatttaaaaatatttaatagtttcttttaattataacattacaaaataacaccttgtagtctggtgagcacaggcttgcctagtgcttagcatgtgccaggcaggccacattctaagctttacacagattgacattttccttttttttttttttttcttgaggccgagttttgctctgttgcccaggctggagtgcagtgatgtgatctcgcctcactgcaactcccacctctcagattcaagcgattcttgtgcctcagcctcctgagtagctgggattatagacatgtaccaccagtcccggctaatttttgtgtttttagtagagatggggtttcgccatgttggccaggatggtcttgaactccaggcctcaagtgatctgcctgcctcagcttcccaaagtgttgtgattacaggagtgaaccactgcgcctggcccaaagattgacattttaaaatacagcagctaggtggggtggattctattattatcccattgtacaaatgaagaaactgtggcacagagaaattaataataggttacgtagccagtgtaacccagaacatcttagttcatgttgcatgtctctcatttgctggaagcatatcagtcaacaagaaaattattgttttgcttccagtttgagtaatgttcctgtgacttctttaagtgctgtatatttgctgcatttgctgggagtgaacgaggccctgaagctttcgtagatctgtgcaggaactggagtgagccagtgtgtgccaccatgggtgtccctcgatgttctctcctgtcccttcaactgtgctctgcaggagtcagacctgtggggacagttcacaggaacaaaacagaagctccaaccaagagctgcaggatttaaggacaaggctgcaaaacaagtacgtggagctggcacgcaaactcagggctttctgaaacacaaacttcagcatttaattaaatgggggaaggaaggaactctcaaccgagatactgaactgcactgtgtctctacaaaatgcgagtgtcccacattttaagggtgaatggatatctctaaaagaaaacacctctctcattcacgtctattctgtatgctttcttgattggctgaggaaggggtgaaatcatgctctcctttcattcccctccttcgactaggaaggcgttctttgatgcaccattaatagttttagcaattactctcaaccatagtgaatgtgtaactcctgttttcatttaaatttgatcaatgactcagttgttattaaaatgcaagaaatagtagaagtttttgtatatatatacctgtgatgagtgcgggtgagaatggtcctgtggttttatttctcttttttgttcgactttatttgttagatcagtttcatgttcacacgaaattgagtggaaggtacggaggtttcccatataagtcttgcgccgccccccaccccatgcatagtttccctcattatcaacatcccccagcagaatacgtctgtcacaattgataaacttgcattgacacatcattgtcacccaaagtcctttgtttacattagggttccctcttggtgttgtaccttctgtgagtttggacaaatttataatgacacgtatctccaattagagtagcataattttatctctttataaatgctcaagtcagggcttcttattttaatttaagggggattaaatgatcgtaagtgcatttgttacatcattgtgcttattaataatctgtttaaagtatctgtaatgctttgtgttataactttaaacaacagaaaatgatgttatttgtaacggtacatccttgctctgcgtgctaatgtccttgaggagtcgaagtaagtctaggaaaaaaaaagtcaactcagtttaaaaaaaaaaaaaggtaatcgtaagcatttttttttccttctaaaaggatttctttgtgtttgggggcagggaggacatgtcttgaaataagtgaacatgtgcttgtaaaatgttttttaagtgttgtcgtccctgtaagtctgtgcctttctgaaaatctgggtatgaaaccagatcatgtgtgtaaagggaaatggaacattctggaacacctgtagtctgttgcccccagcaagttgacatgctaacatgctaggtgacaaaagggcatcatgataaagccactgagacttaaattcttgcttttttttttttttaagagggagtctcattctgtcgcccaggctggagtgcagggccgcgatcttgactcactgcaacctccactttctgggttcaagcaattcttgtgccttaaccccccgagtagctgggactatgggcgtggtgcgtaccaccacgtccagctgatttttgtatttttagtagagacagggtttcgccacgttggccaggctagtctcgaagtcctgacctcagatgatttgcctgccttggcctcccaaagtgctggggttacaggcatgagccaccacgcccggctccctccaaccttcttaacttcagtttccggtgtctaacttgacactattgatgtctgcctcttgctatgaattagcaaaaggtgaggattggccaggcacagagtaatgtctccataagggttggctgttcctgccattctcctgcctgttctaatctagatctctgtttcctttatagcattcacaacacatggtcattattttatttgtgaatttgtcttacttgtttttggattgtgtctcaccatatgatcttgttgttggtgaacttgtcttatttatgtgtgactctcaccatttcccttcctagtctgtcatggaagctctatgcctccagaccctgggtctgtctccctaacaccctgcaccttggttctcaccgaatgcttgtccactgccagcagaaaacaaaacactgctgtgtccctgcaaagcactgcagctcttgccagaatgttcatcgtgtgtgacttttcaagtgcaataagtcacgggtactatgtgaaattggataaagataatttttttgcaaatatatccttacattgtaaactatcagctagggttgaagttttctaattgatattttaggttcttaaatattggaagataacttttaatttggtgagattctatacatgaacatatttccaatgtataccttcttgataagattatacgtattgtacattctcggaatctggaggacacaataattaagtgaaaggtggctttaacaccatgtgtgctttttcagacaagtaaattagtccatgccagtgtaatgggatctgcttataagtgatctactttaacatcagacttgattctctatggtgtcactttttgtttgatttgttttgtgtatttaggtaacaatgatatcaaacctcaaacataaaacataatagtgttttccagtatcaggaaaacagattccttaaggatccctaatgcatgagtgtctaggggcctaggttctagttagtaaactccactaagctgaggatctgagactgggcacggccagaggaatcctgggagtcatcgtttacaactctgcattttaggggtgagggagctcgtgacagagggtctgggtgtgacccacaagcacactgccattgtttacatcgtcagacttaagagttctgttttggccttcgtgggacttgataggagggaaggcattgaatatatatttgtgtttatgtatatcaaagatactataattgtagtgttttttttttttttttgagacggagtctcgctctgttgccaggctgtagtgcagtggtgcgatcttggctaactgcaacctccacctcctgggttcaagcggttctcctgcctcagcctcctgagtagctgggactacagatgtgcgccaccatgcccagctaattttgtagttttagtagagatggggtttcaccatgttggccaggctggtctcatgatccacccgcctcggcctcccaaagtgctgggattacaggcgtgagccaccatgcccagccgatactataattatagttttaaaaaatgtacttaaatatcagtgttgagccgggtgcagtggctcacgcctgtaatcccagcactttgggaggccgaggtgggtagatcttgaggtcaggagttcaagaccagcctgaccaatatgatgaaaccccgtctctactaaaaatacaaaaattagctgggtgtggtggtgtgcatctgtaatcccagctactcaggaggctgaggcaggagaattgcttgcagctgggagatggaggttgccgtgagctgagctcacaccattacactctagcctgggcaacagagtgaaagtgagactccgtctcaaaaaaaaaaaaaaaaaatcagtgttgaaatgtgacatttttttccctgtagtggctgtcaaataattcatatttaaaattatttttgctttctcccattttgaagatggagttttatgttataattgttgatattacaacagacatcttacaaatgctaaatctaaatgccaaatatatgatattattgtattcaggagaccaaatctatcaataccactttgtggttaatttatttttaaaaataaacactcttacctcagcaatttaatatgagattaatgataataaattttataggcctttaaaaattagtaggctctgtgtagaaagttacttttttttttttctctaggcagaaaatctcagtttttactgtttggcttacttttttaaaaaacaaaaacttacagagaaaaattgctggagtggctgaaggaaaaatggagaaagggataaaagaaagatggaagaagaaattgagatcacagtgaataaatacattgctcaggataactcagggggtagcagaagccctgggattcagaaccaagtctgtataatgcctgagcttgtgtgctggctttcatggagtcaaaatgtaaaactaggggacagtagggcattactactaataagtcgaataataccaacgcgtggatagagaaaaaaaaatcaagagaattccaggaaaaagaaaaaaacaccacggttagatgttttctagaattttctataattattggagaaggtttctctggggtatttggaggagttctttcagccagaaacaatagccacaacttgtcccagctgtgggatgggcttggcctctttaaaggacagttgagactctcttgacaagaacccaacactgtaaaataaaagacctggccgggcgcggtggctcacgcctgtaatcccagcactttgagaggccaaggcgggtggatcataaggtcaggagttcgaggcctgcctggccaacatggtgaaaccctgtctctactaaagataaaaaaaaaaaaaaattacctgggagtggtggtgcgcacctgtcatcccagctacttgggatgctgaggcaggagaatcgcttgaacctgggaggcagaggttgcggtgagccgagatggcaccattgcactccatcctgggtgacagggtgagactgtgtctcaataaataaataaaagacttttggaaaggtggagactctagactgcaggagatgtggccgccccgaaaactggctgaactttgttaaatacaactcatgattagaggaatgaatagtgctgtgttttaactttgtaaaatacaactcatgattagaggaatgaataatgtcaactcacatctctgtgactagatgcaggcttcttaggatatttgtaacttgaagaaatctggaaggacctcattctctaattgcccattttcccaatttgctttacaaatccttctgtggaaagtctttttgaaaatagcatttttgctccctcttagcctctggggttctgaacgctttggcagtgaccattgagaatcaccctgccttccatcagttaccttgtatcaccttataaaagtcatttggccgttgcagtggctcacacctgtaatcccagcactttgtgaggctgaggccagcggattgcctgagtacagaagttgaagaccagtctgggtaacatggcgaaaccctgtgtctacaaaaaatacaaaaaatagctgggcatggtggtgcacctgtagtcccagctactccggaagctgaggtgggaggattgcttgtgtccaggaggcagaggctgcagtgagccgagattgcgttgttgcactccagcctgggcgacagagccagaccctgtctctaaataaataaataaataagtagatagataaatgccatttggatttctgaaagcaaggtttgtcttttaaatgtcagttggatttccgaatgttggattcttaaagttctgaacatgtaaagtataggccactggatctcagagctttttatccaggtgcccagaggctgagaaaatgccccataggttctataaaggacatggatcctgacttcatacaggtcaacaactatgttactgtgtttttatctggtttagaggatgggaaacccatcagtgttattatgccttcattcaattatggaagaaatcggttgaataccagactgcccaatgaatgtagtttctgtatattttcaggcttttagactgatctgaagttgtgcctctatgcacgaatgctgcttcttcaaaaggtgccagtggctgggggtcaactttgatgtggcctataaagttcctggcccagcacttaggcctgcctttcaggacataacctctcagctggatttaagaaatagcatctctttcagtgtgaggcagcggcaggaatgaagtgtgttcgtgtccgtgtgctggcgcttcgtatgtacatttttgttgcgtctttaacttagaaaatcagtagactttatgagtatcagaggataaatgtactgcagaggatgagaaaatatttagcgtttttgtggtctctcttcagcagtgcctccctctttcctggaaaagggcattggtgaccagagaaattgtgattctgtttgcatcctaggccaccatggagttgacttatgtgtagactggccatagcccagggtcatccctcccctctctgtcttgttctcagttgcttgtcatcatttccattcaaacacttgaatattccagatctgggatagtgggcagatggtttcatgctattcaatattctagtaaatatcttttcaatggttacctgtagtcagtcacattgtcagaattctcacttcagctatacgtgtgacaatcccttggctcacacttaaatttaacccagtgcttgtaaactgtggaaattaaaggacctagttgataccaaatgtccgttatctggagtagcctctgtcggtagctggatgccttcatttgatgtgaaaacaattgtgtcatagttgaaaataaaagaatgtttttcagcatgtgctgttgctgtgtgctggataagacttttataattaaaaatttcccctgaatgtcaatacatatatggtattcattttatagtggactatgctgtgttactttagagaggctactgctgcagaaccatcagaaaatatctgtttcagccccaattggacatgactctcgggtatgctgttgtttaataatcattacattagacggttcaatctttatccaaagattggacattctcattgcatacatttgagggttaataaaaccaagctcaggcacttcggtattcttttaaactctgaatgatgtcccctgtagaatgtgaatgatttccagcccgtgtttaccatgtcctaaaacacgcatatttatgggtgcctacaagatggcacagaatgaatcaaaaccataatctcttaaaaaatatgtaccacactgcagttgtgcttgttgataatttaaaaagcacgtttacatgtggtgcgcctattctaggtctccttgatttccttcttccctttgtaccaccactccatgggctgtagcatcctttaagtatggaggccctgctccatgtcatagtaaccatcaacacacactcccatccccaattaactgtagtttgcaaaattatatatgtgttgcattgtagaggctcattggcataagtattcctgtagacaaacacttattaaaatctagaggtcttcttttttgtattttggtggcactattttattttctgagatctcaaacttttacactttcatggcccttgtgagctcagacccccttattctgtgcctgcagagcccaacgcaggaaccgtccctgttgttggccttgcattgatggtgggcctgtcctgtgtggggtgcagtaaatgtgagtcttcctgcagccttcttgctttcatccagaagcaaatttggtcaaaacaagaagccatctgctcctctcttggggatgcctgtagcagcaagtcaggatttttatctccttggattgcaacattcagggccttctgcgtggtagatccctactgagctttggggccagcaaaagtctagatgggtatgattaactggtgaggaatttcagaagccagatgcagttactgttccaaccatgaggcttttccagtcacattgagtcaatgctaaggcattttcctggcatacactttttttaacccttcctaaaatcacaaaaccaaagggttttaaccctttgagtttgagatctcagaaaataaaatagtgccaccaaaatacaaaaaagacctctagattttaatgtgaccacaacctttttaccttttttaaacttcaatttagactctattttttttctataaatgattctgtctgtagtaacgtttatctatctttgcatcttccgactttattaatttttcttcaacccacaacttgatctaagtctttttcttgaccatttgtaaggcttctcattctaatgtgttttaaggatttccttttatttttacctattgctgacacccttcttgctagtgctgttttgtccacctatactgaggtacaccattgattttaatttttttttcttcttgtttttaagactggagtcttggtctgtcctccaggctggagtgcagtggtgtgatctcagctcactgtaacctccgcctcttggattcaagcaattctcgtgcctcagcctctaagtagctggggttacagacatgtgccaccacgcccagctaatttttgtatgttttttttagtagagatgagatttcaccatgttggccagtctggtctcaaactcctgacctcaagtgatccacctgccttggcctcccaaagtgctgggatgataggcgtgagccaccgcgcccggccctgattttaatttggggcatattccacttgactttaaaaggtcgctttgttctttacaaaactttgcacttcgtaaaaagtgtgttctttgatgaacttgtctattcttttctgaaattttcagcattgactttatggtaactattaacaatcagtctaattttttgttactatttattttttacagcatcaatatataatttatgtggagaagtcaatgaacagacttggcatttttaagtgattctatactccaaatactggtcattgagaaaagtttgtttgagagatgatcataggggaaggggtcgcatgaatattgtatcgtctaatgtattgaagtttatttttatttttatttttattttagttttttgagacggagtctcgctttgtcgcccaggctggagtgcagtggcccgatctcggctcactgtaagctccacctcccgggttcatgccattctcctgcctcagcctcccaagtagctgggactacaggtgcccaccaccatgcccggctaatttgttgtatttttagtagagatggggtttcactgcgttagccaggatggtctcgatctactgacctcgtgatccgcccgcctcggcctcccaaagtgctgggattacaggcgtgagccacagcgcccggccaaaatattttaacctgaatttttggtgtttgaagagtggttttgagcgatctacacgctgttagatttagattttgctgcatagaacagaaaacctaaaactaaaatggcttacgtgagagaaaaggttaactcttcatatgttaaattccagaaatgggttctagggctgatctggtagttgaggggtgtgatcaagtttccagatttcagatatccaaaataccctgattttatcattacacattgtatacaaatatcaaaatatcacatgtacccccaaaatatataatgtgattatatgtcaatacaaaaccattaaatatcccaaataccccgattttatcattacacattgtatacaagtatcaaaatatcacatgtacccccaaaatacataaaatggttatacatcaatacaaaagcattaaacatcccaaataccctgattttattattacacattgtatacaagtatcaacatatcacatgtacccctaaaatatataaaatgattttacatcaatacaaaaccattaaatatatgttaaaaagatttcagactcatctctcagctcttccttccacagtgttggtttctgtggaagggtccaaacagcggctggagctccaactgtctttgtctagcagcaggaggaggtagggaagaacaaaagctttctcagaaggccatgcagtatttcagctcatattttgttttctagcacctagcagtggagttatgaacatattttagtggaacatatttagtggaacataagcattggatgtgagggtagcggtggtggtggtgaaagttggtccagaaagactcccacatttctggctgggcgatggggtggatgtggttctaatctcttgggagggagcagaggagaaagaaggttcgggtaggtgagaaaggtagtgatgagctcacttggggaaatgttgagtttgaaggacatcctgttgggtcagttgtagaccactatgtgcatgagtctgaagctcaagaaataatctagtgggcgctagagtgtagacaaagaatcctcagtatcccagagggctttcaaaacccttcaactggatgggtctcccagcaagtgcaccaagactgaattggtgagcgccaaggatgacagccccttgaacctttggaggaagtcatggacagagggcagaggagaggagcttaggttgggacttggagatgagaaagctaggtctagggagaattaaagggaagctgtgactggggagtaagctcatgataagaaacagctgtgttttctttagcttcatttttgccattcggctattattttttggtattatggaaacatcgcaaacatgaacattctaactttagaggtgggcaggcaggagataatcagaagggcgccacaagaccatgtaatctgctcaagagggagcatttaagtctttattgtcttatttaatttttataaatcccctctcatgtaaaggtattattatccctattttgtacttgtgtaaaaacaggctcagaggttaggttacttgctgtgtgccatgcagcagaaagggatggaactcttgcttgacacccaagcacgttttttggagatgttctctgtggatgttgtgccttggcaccacacctcctggggagtttaacctgtgtgtccagagtttttgacctggtacgtgctgtgtagcaacctgtctctttgctctcaggcagaatacatagaagaaggaattagagttaagaaacaaaaagactatcttgtttcccaatcttaaaaagttcccatgtgacattgtttttcactgataatattgttgcaaaccaaaaagttcctgattaatctttgcaatatcctttagacctgaatcacactctcatctgatcataggaactgagtcactagtgaagtaccttcatctaagactctgggcaggggtcagtcaagtttttcttaaagggccagataataataaatactttagactttcccagccatgcagtttctgttgcagctcctcaactctgctcttgagtgtgaaagcacttgctgataataggtcaatgaatggccatggctgtgttccaataaaacttcaggtagcccagtatactcacctctcctctagaagaaaagacgaattctagaatttctagctcataatctggcaagtaaaatcatctgacaaaatcataaaataatcaattggtttttttttcattattttcaaagttcaaaatatttagttactttaaaaaggacttatctctgtaatgattatttatttgtttatttgtatttacttttttaagacagggtctcactctgtcactcaggctggagtgcagtggcgtgataatggctcactacagcctcaccctactgggctcaagtaattctcccaccttagccttcccagtagctgggactacaggcgtacgccaccatgcccagctaattctttgtattttttgcagagatgggggtctcactatgtttcccaggctggtctggaacccctggactgaagtgatcctcctaccttggcctcccaaagtgctgggattacaggcatgagctaccatgtctggcttataatgatcttttacaagtgtaatgatggttttaggagaacagatgcacagtatgacattagattccccactttcttctctattttgtttctttctgtgtagtcttgctggaattctgattaatcatggtccttcccaatctctcagaatgacccatatctttcagaactattgtcttaatcatgaagaccctcaattaccaaattgagaagtttatgttgctttgaccaccatctgtgtgcatcccgatacctggggttacagactggaatctgtgatcaagggagagcgtggatacttgctttattaacaaatttacgtgtgttttactcaccagtgatgagaagaccaccgacacattcaggaggctttatggaacagagaaatccttcaacattaattactgtatctagtgtttttttttgttttatgcaaaagatgtacgtagctattttggaaaagcattataagtagaacttgcatgttgatagctttaggatgtgttcagattacaaatctccatttgtactatacttgagtttttggtaatttgaactagactagatctttaagggaaaaaatatatatatattttttctcagagaacaaaccaggaaaactttagcatcttgaaggtaaattagtgttgattatgacaagtgagaataattaatttgcaaatagtcataagcagattatctttttagcagttagttctcatttatttgtaattgaaaaaacaaatatctgctaacataattgtaattcatcttttgtgttcatttttaaagtgcctgttcctttccagacaagctgcactcatgcatggcagtgttacaagggtgggcttgtagactgagtttgggaagtgctatgaatctactaggatcacctatcacaatcaagattccataattccaagtaaaggaagatgcttttgcctgacttagatgatggttcggattctagtgtagttttttttggaaatgcagttctgtcactttcacagctatgttaccaatgaaataagtctgtgtgaataagtaaagggaggtaagttgataaaagcattcagtttgcaacggatctgcagtgcatcatggtgctcaatacagtttttgaataatcacatttatttatcagattttaattggagaagatttgcagatcccacctttgaatcattacaaagtatgaatcctgtcatctagaatactgaaatttagtatgtaccatgcttaggactgatccgaagacattttaggtttgaataagaaaaaagaggcaaagaggcccaatataaaaacagagagaataaatcttaaagcaccatctatgttggatatccttattgcaagagatcccacattggacagacgatttcagttgacaccaaaggaagtaagaattttctgagactgacgggtatcttggtaaatgttccctctttgcaggtggtcgtagataatttcaattcaccctctgctttcttcgaactgacgaaggtgtagctttgatattttcccctcttcatgttacatgatcatttattctaactggcaacattttatttatttatttatttggacccattgttccaaacatgtaaaagatttggacctgcaaatctttctatgttagtatttattgtattagtgtttgagatacctggaattttggagatgaagtgactcaatccatttattttctagaagaaatcttagagatgtgagggacaggtgtagattcacaagagctaggacatgctgttctaacaaaaatcctccttccctttggttcaatttttaatctattttaggtccttccatttcacattaatgacatagtaatctacccacttaaaactataataagttcactaggtttttttttcccattaaaacagactcatgagtcatagtttactattactttccaagcttttattctgtattttccttaacatctgagaatcatgtggaatctgtggtacctgtgctaatctgaagccactatgtattttgaaacctcttgccccacgttggatgcctggtgtcgatcaggaagtgttgcaacgtgtaacacatcactcaccactcttgacggtgttacagggtaggaagttgtagagatgcaaggctgactgtggacgtaaataatagaacattcagaatcatcactgaggcagagttttgccagcttgtataaatcaggtaaatttgctcatgttaaatgcatctctttcacttccaccttctgtttcaagttgacaatgtttgcatttgactcctattaagacactatgcctttcctcaaacatatctgttgcaatttcatgatttcttaagactaatgctgtcaccagtatatttcatttagcaacgtcctgcacaccagagtaggtttctagatagggaactcaagatactcacatgaaggaggcatgggctgagtgtgtagggtagaaacttggtctttgaatcagaaggaatttgcacccagctgagggaatcttgaggtgtcctcttgttgacatctgaggtttcacatgctcttcatttgtctggtatctgcatgacttgcctgcaccccacttttttgcagcttccaccttggcccatatctcagagcacaaacaatttgaaggacattccaaggtgaatccagaaaactacattaggaaagatttaggagcctgcctagttcttttctactctaactcttgtggaatagattgatttttctgttgtagtttatttgttaaaattgtttaaggccacactgtcagaatttagctcacaggctagcatcggctctgctacctttgacccttttaagagtcatagttttcctatgatgtagaatggaaagatctatgggcagtcagggtcgacctttgggtgccctgcttctagtgcagtgcctggatgtttgtgtcatttctcaaataaataagtgaatttgagtgctcaatagaatctagttgtgtgtatacattattactgcacgtttgtgcaaaaactaaaaattatagacataaaggatacaattctagtcatttatattacaaatgaaataaccaaccctgggaggttaacagtggcttgtttaatgtcagcagctagtttagtggctgtaacgagactgaatcccaagttgaacagaaatcgtttaaaaattcaagttttaaaaatcaagtacaatgaatgatattggctgcttttctaaggagagtgattctctaagcctataggaaaaaaatactggtggctgacttgtggccttaattgcatgctaaggttgaggaaggatctccagtaattctttgctttactttgtgtttgaatataggattttatagctgtgggtggaaaaaaaaatatttctagggaaaaggtttcctgataatttaactgaaccccaaacaagtgaactgggtgaaacagaatatggcacatggtcctttatcacaacctttctacctaacctaaagccagtaagatggaaatagtttggaaaagacactatctgctgaggttgctttaaatagagtctctcctgggacttagaacacattttgaggctcattctcccttttgatagtttcttggagacatttttctgtatatactggatgcaggcatttgtattcctggatggcattcatcttttaccagtgtgaggaggctgtttttatcattgtgagatttattaacatttacttgctcttagaatctacagattatataacagatattgcaggctataacctagaatttaaatattaaaaagagtgattaaaaaacaaaacaaaaagagtgattctttttgttataattgaatcaattcctattgtttacctgtgttgaatacagtaattggtcccaccgatcttttacttaatcttgaaattcagagttattctctattctacatgaatggagctgggaaatggttttaggtaaatgaaggtaaaatgtactgaatacctactgtgtgtagtgagctgaactatatcctttactgcaaatattccatttaatgctaacaaccacctccccttctattttcttctgtaggcaaaggttgagttcactgaggctgactccctgccccaggtcacatagctgaacgtggtctctcatccccttgcctatgtgctttttttcacagagtatattggattgagatccaaaacttattggcaagccatcaaagttccgcttgaactaaaagaggaaaacctgttttctgaaatgtgaactttaattacataaaatggaggcttctgaaaacagtattgtctcacagggcaggctataaaccttgaacaatggaagcttcatgttgtgtaagaaaggagcttacagagccaaacagcaccgttcctgtgtttcccctgccagtgacaggagcatctggggtagcaaggggactgcccagggcctggtgttatcatcaggggttcttgaaattgctcacactgctcttgcttttccatacaggctgcttatatcttgcctcctctggctaaactgtggtactaacaagacggcagttggctgctggggaaattctgatagggagagtaggtctgggtcattctaatttatttgtggctctggtagcaaagagaactcaaaggcagtatatctctatagctgatgagatttcactggggccgacaccacctgttctgtgcacactcacttctcggttagacctggctaggttttctgctgtgcttgtttttagctttgtaaccagcagtaatcacattggtctttgggattttcatgtttcaggttttacagatgatgcaaaagcattagttttcaaagtcactgcaaatgctatgtatatgtatttctcaacatgcagcccctgcactacttgttttggtgttacctggtcaacttggtagaaaatagattcttgggactcatgctgagcccactaattaattatcttgggaaagagataacactccccccacctatatttttaacaagcttctcagatgattcctgtttacataaatttcactcccaatattagacacgttatacagaaacattggcaaataagaggttgaagtgactttgttctgagtcacatcatgagtaaggggcagttggtattgaattctagtttgtgtttcatccccaagtctggggatgaaatgcatcgtctctggaattccatggctggggacaaataccctctgttatgtttttaaatgtcacagccctctgggattcacaccttgggtgttgccttgtggctcagtgcctggttttttaggtagctaaagggctcaaatttgaagaaggcaaaagtgtggagcagaaagtgagcatggacaatttggggtgaagcatttgcttgagaaatctggggagatacatttgaatttataaggagggaccagatgacaaatgtcattgaaagtcacactatgctgtttgaactcaacatggcagtagaatctggaaatggcacactgcatatgtattagtccattttcatgctgctgataaagataaacccgagactgggcaatttacaaaagaaagaggtttattggacttatagttccacatggctagggaggcctcacaatcatgggggaaggtgaaaggcaaggatgagcaagtcatgtcttacatggatggtggcaggcaaaaagagaacttgtgcagggaaactcctgtttttaaaaccatcaactctcgtgagactcattcaccaccacaaaaacagtgcaggaaagacctgcccccataatttaatcacctcccacggggttcctcccagtacacacgggaattgtgggagttacaattcaagatgagatttgggtggggacacagccaaaccatatcagcatagtattcatctttggattgaatacattcttttattaatttggcaaacatttaccaaacccctgttagtgctgaacatgacaaaggaaaaagcaaattctttgtttagtatgtcaaggacatacataaaggattttagatggttttcactgaaaatcattaaaatatgaaatagcattaggactgaaaatactacatttgctgttggtgccaaaaaaaattgatacatgaaaatgtcaatatgtaagaattttaggtggtcgtgaaaagtgtgaaccagccctttatttttggagacaggaactactggaaataaattgcagttatttctggagtaggcaggcttcccctcttctccctaatcaccagcctgtctttgtcaggtggccacattgatcgagcctgtcatggctccaagcccatcatggtctgtctagtccattaagaagcagcagaaatatctcagctgctctaagtgttttccttgtgccttattttgagctctgtttggagaattctaaattagttgtggtgatatgatctattagtttcctggtctatggaagagagaaatggtacagaaatgatctctgcagtttgcatttcctgagcgggttgtggttcacttactccctttattgaccaaaagagcaggtgattcatgtaaaatcatatgttaggctgcaataactggggcttttgaaaggaccacccgttaagtgcaaataaataacaatgtgaacacacagcagactctaaaaagcatattagactattgacgagaatgaataatgcatgtttcctgatagtgtttgctacatgtggcaggatgtattaaaaaagaagaaaaaaccttctgcattagtgtctatacagtcaacctttacattcaaggagaagcttaactattatctgccacctttatagaagcattatcaagtcagggttttatggttaaatcttgtagaatcaattgggagattcacctttaaaaattggtctctacaatatgcacatagtaacaaaagaaaaaaaaatcttgacaatatcattgtagtgatttctgcattctggtctttaattatgtgctgagtcccggtggcagagagtttgtgatcatggatggcgcctggaacttgaccgcatttcatttaatgcaacggaaatttcagttacaatttagtttattgatttttttctactgctggtgaaaggtaagttacataacccaacttctagtcagggactcttccatcttacagttcataatttgcaaattagatgttcccgtctgtagtgagtctgtgatgtttatctagtacccattgtgcacgaacaaccacaaagcaaaatctttgttctgaagcctcagattgatgttgaataaatattgaagaaacgccctaggtcaagattcaagtgaagtcaggcaagcctattttactgctaaaactttgaacgcaatccaacaatataaaagggttaagcaggcctggcctggtggtggctaacacctgtaatcccagcactttgggagaccagggtgggaggattgattgcttgagctcaggagttaaagactagcctgggaaatatagtgagactcccatctctaaaaattttttaaaaatctattttataaataaaatgtaaaaggcttaggcaatgatgatttagataaatgaccaaagatggatggtttatctaaagaccaagaccagattgcacagtaaggacacaataagaagttcttaagaattaaggttcgtttttttacatttatgtagggaatacacatgtggatgctgactgtgcatttccttatctcagaagctcctaaaaccatttataatgtagcaagcctgtttgctttacttttgcataccggttgtttcacacaataagacctctccaggtttagtggtcactgtggcagttcttcagcattttagttgttgaaatgtctgtccctttcccagtacttaagaaatcctaagtgttgtaatacgagagtactatgaaggtaaatgactgcagaatgaaatactgtaaggtaaaggactatttcaaagagacatgatctaacgtttactatgtggagatcttgtggagccattactctggaataattcagatttaaccatattcatgtaaaagagagcatgttgagttggaataaccatcagatttggaatttatctcattggcttctctcccccccaccgtctgcataacaaagtgttccacttcagcaaacatctggacttaactttctgaatctcccagaactttgcgctgtcaagattcctccctcaactttccactttagttttgatttttatcctttgtctcatcctatcttcccatagatattttcagttcttgcaaatccttgtaaacaaataaaagtcttgccaaaattgcacgtttctgccgttaccaacactctctggtattgaccattgtggctttctcttctggcgcctcatgtgctctgtgagccctttcaaagaggcaggtgtcttcactcctttatcgaagtgactctagggtccgttgttgacagcccatcaccggatcaatttgcgccatctcttcttatcttttgtaacctttttgtagcagcatatgcctcctccaagctgctttgtaaaattttctcttttgattttttgagacatcatcttttcctttctaactcctacaagagctgtttttctgctttctgtcatctaagtaattttccctattaggcaacctttatagatttagagtccatcttttctcactccaagtatctgagagtcctctccttcctcttaaatatcaatagggttttctaataatctcaactggacatttcctctttgttccctttgacataaacactttgcatttacccatcctcatctgtagaaagcttatttgttcttcagggcaacttatcatgatggctaagaaaccttaacgttaacctggttgagtgagccagagtgcctgcattcacctcacacctccacaaataactggttggttgatcttgggcaagttatttatctcctatgtgtctttgtttcctcatgctaaagtggggatagtaataattcctccctcgtagaactgatgagatagctaatgagttgatatgtgtaaagataagtatcaaaacagtcttatgctgagtgtatatgaataagtattttttatatttctactgtctcagactctaccttctctataaatctttctgatcctgatctcaactaatcgtcatctcttctggtgaaactattgcttttccttctcttgataacgtttgacttactctcatttatattttaattgtcttcatatgtcttctccctcttgctagactaggctcttcactcacttatgttccctgtcacgtcttacacctaaagatatttcctcactaagatcaaatcttcttttttttttttttgagaaggagtcttgctctggcgcccaggctggagtgcagtggcacgatctcggctcactgcaagctccgcctccctggttcatgccattctcctgcctcagcctcccgagtaactgagactacaggcacccgccaccacgcccggctaattttttatattttttagtagagatggggtttcaccgtattagccaggatggtctcgatctcctgacctcatgatccgcccgccttggcctctcaaagtgctgggattacaggcgtgagccactgcacccagccctaatcaaatctatttttctagactaattctgaacatcagaagttcttgagatcactctggatgttgacttttacaaattatattgtgacagagtctcattgtgtatctttatggggtacaaagtagtattacattttttttttaacatttcttttctttccttttctaatagagacagggtctcactattttgcccaggctggtctcaaactcctgggctcaagtgatcctcttgcttcggcctcccaaagtcctgggattacaggcatgagccactgcaccccagctggtattacaatttttgaataaaatgtggtaagataaaattaaggtaatgaacattgctcacctcagatatttatgcattttggatttttgatgagagatccccaaagaccctgtgccagtgcatctgtaggactagactgggcttcatgaagaataatggaggcgtttcttgtgattaatcttcttttgtattagggactttctgactttgtagatccaactcatctggatcacctctttgggaaaatttggttgtagaaatgtgagtgtgtgctaatctgtgtatgtgtactttgttccctcaagtttgttgcatatctttatcatacttttttacagtgaggaacatttttattgtgacaaggtaataaattgtctcgaatgttttctctaaatttttactcatgatatttcaaaggtttacctagaaacttagacatgggttggcacctcttaggacagtttcctctccccagaggacatctgcatcctctaaatgatggggatgttattagaattgctaaatatgagccttggctgaatcagacaccgacaacaataatttcaacaatggaaattgccaccaggcactgaagacttgacaagtcactgcgacagagcacatactggttggaatactaaaaatacacatgggctgcattacctttatttcattttcctcttttagaataaaaattttgacctttaaaagaaaagggccagtcacttgttgaaaatagaaattgctggacataaatattttagatttctttcttctgacagtattgaaaatactttgtatgtgttgtgcttttttattgtttgtaaattcttttctttatataaaaaagaattttttccctcttattccaacatttgcttcaggtaggtttgaccaatatcttggattctttccacttgtgtaattataaacccaacttgttggtgatggatttgcttgtagatgcaactcagttgtaactttgtgttacttaaaaaaaattgttagtggattggctggtgtataattcttgttaacctttgcagctctgaattagtagatgatagttgcttgtccaagggtacacagttaatgtgctgcagccacacattgaactttgtcttgaaactttgattcattccctgcatctttgtaagcagatatatttttttctgattataagatggaaacagaatgaaaaggagatgacttcttgtcttgattgcaatgatgaagctgcaatcaaaccagaaataacactccagtctctgacacacattgttgcatatttatgttgggttttgctatagacttggagccatcttctccattgtcatctgtctgatctcatccttaataactttattctgctggttctagatgaaatggttaataaatccaaatttgcattttcaaagtagaaactttatagtggatagggcctttgtatgattcaaactgccctatataggaagtgcttagatattataataatgcagggaaagaagatataaataggaatggcatgtaaagtagtgaacatagtaactttcaaatcatatggagaaatttgatatcattttcttattttatatggcagttaatgtatgccagtgattcttattacattacagaaccatggtattgttaattgacagagcaacgtaaatgtaaaaatgtgttaatgaaaaatctaattggagatatcatggagcacatgtggtaattatgggaaggacccagtgcatgtaacccccttggcttgtgggtggataactcctggaaattgtgcattgtgcaaggttgcattttctgaagaagggcaatggtatattggggggcttgccatttttcatccaaaaaccatatcatgcgaagacttgaataacattaaataatggatgtaaccaacaaagtgctactgaaatgaaggttcaacagtccacaaatggtgagcctctgcatatcaaaccttctaaaattaagtgtataggctgagataaacattagcatttcattacccataattttgcttgccgccaaaaatgcagaagggctcttgagagctatttggatgaccctggtctctggagggcatcttttagaaacctgatggcatgtcatcacttagacctgccacaaagcactgaaatcctcttaatggtggtaatgataacactattgtttttcctacttgatactccttttgagccaacatttctccctttcttgctctcctatatccaaacaacctgtttagtaagtgttttatttaaaggactaaagaaaggaagtaataaatgatagttctcagaaacctcacatttcattgcaaagctattagaacaacttccagctcaaatgttaattagataccgttctgatatatagggttgtgtctttaaatactgcaggagtcttgacccaaacccaaagaatgcataggcagcagggctgacccatgcgttttcacttggtaccagcaaagggatttgagaacccttagtcactgcaaggggcagaagtgtcttctattaaggacataataagtcctgctgaagaacaggtcagctcagtaactccagtcgccacagcagttgttggtcaaattgggttcctctggtagcaccacagagcaagggacactaacccgttgggcttcccgattcattgctgtcactttggggcagaatggaggtatgatttaaatcctacagtgcgggatattttcaccctggtgtgtctctgacagtgtcctgctatagaagtttaaggaacagtatatgtggcttcaatttccataagttaaaaatgcaggaaaaagattatgtctggaggagtagattttcagaaaaagcggttttaaggatgatgaaaagagaatttattcaaaatgagaggcattttttctgttccttcgccacctctccctcccttgcttgctctgttctgtctccctccctccttatttcattctcactcttgctcttgttcatctaagagtaatgaatctttgccttattgtgtttgaattcaccatggcctccttgttgatattcctaaagttggcattaaaagctatatctggggtggggcatggtggctcacgcctgtaatcccagcactttaggtgtctgaggcaagcgaatcacctgaggtcaggagtttgagactagcttggccaacatggtgaaaccccgtctctactaaaatactaaaaatacaaaaattagccaggtgtggtggtgcacaggtaatcccagctactcaggaggctgaggcacgagaatcacttgaaccgagaggcgcaagttgcagtgagccgagatcgcgccactgcgctccagcctgagcgacagagcagcaagatcctgtctcaaaaaaaaaaaaaaaaaaaaaaaaatctgacctggaactctttctcaatgtaggaactccaaacataatctttcaaaatgttgcctgtggatagctctgtaaaaatggtgatacaccctggtttcgttttgttaagtggttgtattgcgctggaaatttggggctgagaacttttcccactttatttttctcaacgtttctacataacactaaactgaatatcacattagttttcgagaattgtgattagcccttgtgagattgatttaaactatatttgaaaggataatttaaagtatctgtaggctgatactacttagcatcgcataaaaggaaaagatggtttgattgtttttaggaagcacgcttgctcaaagagattgggtcttgcaaggcaggaccaccagtgattggtagatgacccatcaaaagtaggtaaaggggaaacaaccgagtgtcttccacagccagggcactgtgagctagttctgcgtgagtgaagctgatgaaacctgacttttctgacagttatgacgctatttgagatgtcttcagtgagccattccatcctgactcattccttacagagtttacacattattctgagaagattttctaaatataattgaaaatgttaaaaaacattctgtgctttaataaatatttggatgtcattttacaatttttgtttgtatttttttttgctttttttttttgagacgaagtcttgctctgtcaccaggccccaggctggagtgcggtggcacgatctcatcccgctgcaacctccgcctcccgggttcaagcgattttcctgcttcagcctcccaaatagctgggactatagacgcacgccactgcacctggctaatttttgtatttttagtagagacgaggtttcaccatgttggccacgcttgtcttgaactctcaaccttgtgatcctcctgcctcagcttcccaaagtgctgggattacaggcgtgagccaccgctcccagcccttttttttttttttttttttttttgctttttaaaattttttttatttctaattttcagcaagcttcacgttgaaatgacgtatgaagacatccaatcatagtaatagcagctggttgtcaatttaatcttcagggtgtaagatgatatatttttatgacagtgattagtagatgtattgaactctgttgataataccacttgtttctttatcttgcattgcattttatttagtgccagaagcattcataaaattatttttccccctagaaagagaatacactttaagtatcgttgttttactgattaggaaatttgagatccagagtgggaggtaaccactgagtctcatagcactttgttgacagtggagaccaacccctagcacacctatcgtttttagcaaacttcatactgagtgctaggtggcttgtttttgacacaagtcaaacaaataaaatatttcataatttatttttttcttatacggcattttgctatctactcttccacctttattttctcaaactgaaagactgaattttaatacagtaggctgtgctaatggagtggtgtaaggtaagaaaaaatgtaagtgcgtattaggaaagttctggatgagttggtcatgtcagcagccaaatcatggttgtttagtgaaattatttgctattaagtgtgtacagaggggatcctattatagtttgtaagaattgtggttttttagtgaaattcttagctattaaaatagcgtgtacagaggggatctggacccagtgtgtcctgtggattctgtgtacaaaataaacacagcagatgatctgaagggataaggaatatcttctgtgttccctgacaggcttcctggagaaaaaggaacaagcaattggaaaactcggtagaggagattgtctctattacagagtgtcttcattataacatcagatttcaaattatttctcacctttactctcccaaagaaattttcatattaaatttaagctctcaatagtaagaaggagtttactggtttttctttttggggggtttgctattatagcaatgcataggaccacatatttttcctataaatagaaatttctgtaaaataagaaatacttgttagctctaagactcaacagaattgttttaatttgctttggaggaagaattaaaacctattttttaggcctatgttcattctttatttttatttattgattttttaaccagatcctctgaagacactaaagtgtagttgtctctgaggacaaaaacaaacgaacaaacaacaacaaaaaaacttcaccttaccttgctgacctagctatgaagttgctcttttatggccttcctaggcatgaagaagttagagaaacttgtctttaaaagtttcatgaacgttcataaatgtacacgtttatttattagggaacatgatttgctgccaataaacgaaagaaagatttgtgtcaggactgagtgtgtagtctaagctaacatcagttgtaggaagtgagactcagaaggtgatgggtatgtattccacggatgcaaacactttttgagtttcctggcaggtgtaggcaaaaaaggaccaggctggtgtgatgaataatcacttccaaccctccctctgaccttttcaggcctccctctgatttgcctgctttccagcccaggttgctctgatcaactcacagtgctcgaatggcacactctcttctctcttcaccgaaaagcagaactttatcacatttcttccagaatagctgtttctagccaggtgggattaattggatggaggcttggttttataaggtggaagggaataaaactagtcacaagatagttgtgggggattttaaagatgtaagttagtatctctattaagctatttgacatatgataaacaaacagtattcttctgcaggaagtagcaaaacaaaatgacatttgacaatgttagcttctctcattaacatggtgtgtttagcttattagccaagataagctgtagaccaggtttttaccctttacacgtgaaatttgaggcattaaatgagtaaaagaattgggattccttttccatcttggtgatcaaaacacttttctcttgtttccttggaccaagtgatgaagaggtggtgaggggacagcaaaaaatgcaattacatttcttctctttatttttattttttgagacaagagttttgctcttgttgcccagggtggagtgcaattgtgcgatctcggctcaccgcaacctccacttcccaggttcaagcgattctcctgcctcagcctcctgagtagctgggattacaggcatgcaccaccacatctggctaattttgtatttttagtagagacggggtttctccatgttggtcaggctggtcttcaactcttgacctcagatgatctgcccgcctcggcctcccaaagtgctaggattacaggtgtgagccaccacacacagccccctcttctctttctctgatcactccaatactcgttctaattgggaggaatggatttaactaatctttggtttttatctctgtgtagaaactgatttcttggcagaatggactgttaatatatttaaaaagactgaaaacctcttagaatcttaagtagtaaaatattcagagcgaagaagtagagattttacctttacaatatggtgacaacagataactgtaaaaacttctttttcaaatagaaccagcaggagcatgcatggaacacatataccaaacatctttctgataacattaaacatttttaaaagatgttaaatgttcttttcattgtggtgcttcagattcctgattctagaacttgtgtgtgtggaacctgtgtgctaactattctgttggaatttaccagcaaagaattatctaagaattttcaaactaaatgatgggggaaggaactaacatttttgcagtccctggaaatgtaaaatgttgtactcacatggcctcacattaaattcccattaaattgacatttaaaaaaatttttttattttaaaggaaacggaaggacgatgagattaaataacttgcccaaggattctgggtgggtgtgctgtggaggtgggatttttatactctgccatgacccaatgtgcaaagtctccttgaaattcaattcttgtccaatatttaccagattaaactcagtgaaattcctctctctactactgtttatggttattttctatgccaatattaatcggtaagcctgtcattttcgcccttgtggcatcgagttttctttgaaggacagcttttttgtttgctttttgttttttgttttgctttgttttgttttgaggcagggtctcactctgcccaggccatagtgcagtggctgatctcggctcactgcaacctctgcctcccaggctcaagcctccccagtagctgggatgataggtgtgcaccaccacgcctggctaatttttgtaatttttgtagagacggggttttgccatgttggccaggttgatcttgaactcctgacctcaagtgatccacccacctcggcctcccaaagtgctgggattacaggtgtgagccaccacacccggtctttaaaggacagctccagaattagcttttttctgagatgtcataacagaggtcagttttagtgtttggttaatacataaacacatagaactgaggtcagtgccttcagcattggtctgaattttgttgctgtgctacaaaattctagtgaatttcctagttgtggagaaatgcaaagtcagtctcggccttttcagtagagctttggtttagtgacttttttagttgaagtgacttttcagcatggattgtctattgctgtatttttttaactgctttattttaatcttagaagttccaacttctaactttctataccaaatgatgtctttcaaaattagaagtaacagaaatgaatgaaatcggctgggcatggtggctcacgcctgtaatcccagcatttcgggaggccgaagtgggcagatcacctgaggtcaggagttcaagaccagcctggccaacatggtgaaacctcatctgtgctaaaaatactaaaattagctgggcatggtggcaggctcctgtaatctcagctactcgggaggctgggcaggagaattgcttgaacctgggaggcggaggttgcagtgagccgagattgtgctgctgctgcactccagcctaggtgacagactgagactgcatttcaagaaaaaaaaaaaaaaaaagaaagaaaagaaaaagaatgaaatcattaaactgtatgctcattgctttctcttggtaaaaagcttctctggcaaataggaagatgaaatgttgagaggcagaggatactcaaaatactgaatttcttccttattccctcaacacctgagttctgaactaccccaggtggcaccatccttgtaacccaggcgcataacattcctgggctgagagctttgccccattgccggcttctcagtggagttccttctatcccctctgtggtgccttcctgccttactgaattttgctggacttggcctttgctcatagtacagctccacgaactcagctagtaggatttccttatgggtaaaaggagaatgtgaatggcatactaccccatggtgctgttgagattacatattttatgtaatatatttatgagtaggattgtgcttgatacctaggaaacagttaatagatgttgtaggcaaggtcttcacgcatatggtcttgggaaataatgagacaatcctgcttttcgagggttcaggtgggtcctatgagcgtccctctgatacctcaatataaccagtagaggtaaattagcaaaatgccaggggcgtttgttaactttgtttgaaaaacaaactggattgagacatattttcttacttataacttgattacgtgtgttcattttcgacccagaaacaaatcgcagctgggcataaaacaaagaatagaatgtggccttaactatgtgtcagaaaagccagttttagtaactcagattttaggtttgtaacccaacatgactttaaacctctggggattgctgtatagaatttcatgctgtgggtgtcagaaagcagcaccccatgttatacttactggaccccctatgtttgcactttatcttagtgtctgtaatttctaagttggtgtatgggtttctattactggattgagagaagatcctaaaggcagacctgttaggtttcctgtttcttatttagctcaacctaagggacccaatgtattttgaaatatcagagctgaaattatatttggtataggccattcgtgcatactgactagttaagaattcaatggaagagttataaactataatttaaaatattgatccggtttatttctttatattttcatgtactgctctgtgattgcttataggatgaaagtatatttaattgtattttttgccatgtatgtttgtttctacttttgagggagaaataatcaaaaattaaatccaatagagcctgtctgaagcaggttatgaccaattgccacccccttttctaaaaaaaaaggacatgtaagagaatcttaggtaacatcataaagacctttcttgagaatatgaatagtattttagtcaaatttcagtttattgcttttctcttcccccaactactgaagtcattccagattagaaattagcatatagaatggtgagaaaaattttgactgaagaattcattttcttccaccaaaaactcgacttttaataagataaatataggttatttcactgtcatgaatcttgattccaaggaagtaataaacagcaaatccttcttttctaaataagggatgtatatatttgcaaagctggcaaaggagtgtgtacagttctgccagtggacctgacctgggcaaaaccaggtggttcccccctgctctttctaacctcccttggggtccagggcaaggctgatgctctctcctgggcttttctcatttatgggactaacgaggatagtataatgtgatttctgccacgcttcatccaggaaaagcaaccattttctttgcaaaagcaacatttcagtggattttcactgatgtgtggtgacagaaaaatggacttgaaggaaaaaaaatgcaccaagagtctgtttagctctggccatggttctggatgaaatttattatttataaatttataatttattatttatctggtttaatgcttggttttcagaggagagaatttcaagattcaaatacaaatggagtttcttgtgccagaatgaaagcggcagccttaagacagttgttaatgaccattgaacgtgcatgtatagtttgaattctaaccaggaaattgataatgaacaacaattttatgttactatagaactactttttttaagctgaaaataccttgaaatgaatttatgtcagacacagccagcaagagacactggctttttcataactgcccctgcttggtaagaagatagactgaatcctgtttaccttacgtgtttgaagatgtgtttgctgatataacacacacacatatgtagcagagagagtttgtagtttgagattattttctagaaatctgtgatttgtgctttattacagctgtgcagtttctccagaaagcattttaaaattgcaacgcctttctctagctctaacctgggtctaagatggctgcccctgccatgctgcacatgcctgttccacgcttggtgtttgcatcagacatgggattgcagatgaaaaacagatagcgctcctcctctccagggttgacaaactttgcctctaatcactgattctttgatctcagcttattattccctcaactggctatgattagaagctccacaactgagctccttaatttcttttcgtgacacattgttttaaaaactcatttaaaattattgcagaactcacttaattgagctccttaatgtttttgattctttttaaaatttttaacttttaattgtgtaataacagtgtaatataataatttaactgattacttgggcgtggtgggtacacctgtgggcccagctgtgtgggaggctgaggcgggaggatcccctgagcccaggaggtggaggctgcagtgagaagagatctcaccacggcattccagcctgggtaacatagcgagaccctgtctcaaaaataaatacatgaataaattgaatttaactgtgcctaactatagtttaccatgccacccctttggggtgtgcagtgcagcaggcccagaaccccttgctttgcaaaatgcagctttttgtggtccccacacttgcctagtaaccgccgttttgttttgttttgtgtttgcttccagaactccaagatgggaggcaagctcagcaagaagaagaagggctacaatgtgaacgacgagaaagccaaggagaaagacaagaaggccgagggcgcggcgacggaagaggaggggaccccgaaggagagtgagccccaggcggccgcagagcccgccgaggccaaggagggcaaggagaagcccgaccaggacgccgagggcaaggccgaggagaaggagggcgagaaggacgcggcggctgccaaggaggaggccccgaaggcggagcccgagaagacggagggcgcggcagaggccaaggctgagcccccgaaggcgcccgagcaggagcaggcggcccccggccccgctgcgggcggcgaggcccccaaagctgctgaggccgccgcggccccggccgagagcgcggcccctgccgccggggaggagcccagcaaggaggaaggggaacccaaaaagactgaggcgcccgcagctcctgccgcccaggagaccaaaagtgacggggccccagcttcagactcaaaacccggcagctcggaggctgccccctcttccaaggagacccccgcagccacggaagcgcctagttccacacccaaggcccagggccccgcagcctctgcagaagagcccaagccggtggaggccccggcagctaattccgaccaaaccgtaaccgtgaaagagtgacaaggacagcctataggaaaaacaataccacttaaaacaatctcctctctctctctctctctctctctctatctctctctctatctcctctctctctctcctctcctatctctcctctctctctctcctatactaacttgtttcaaattggaagtaatgatatgtattgcccaaggaaaaatacaggatgttgtcccatcaagggagggagggggtgggagaatccaaatagtatttttgtggggaaatatctaatataccttcagtcaactttaccaagaagtcctggatttccaagatccgcgtctgaaagtgcagtacatcgtttgtacctgaaactgccgccacatgcactcctccaccgctgagagttgaatagcttttcttctgcaatgggagttgggagtgatgcgtttgattctgcccacagggcctgtgccaaggcaatcagatctttatgagagcagtattttctgtgttttctttttaatttacagcctttcttattttgatatttttttaatgttgtggatgaatgccagctttcagacagagcccacttagcttgtccacatggatctcaatgccaatcctccattcttcctctccagatatttttgggagtgacaaacattctctcatcctacttagcctacctagatttctcatgacgagttaatgcatgtccgtggttgggtgcacctgtagttctgtttattggtcagtggaaatgaaaaaaaaaaaaaaaaaaagtctgcgttcattgcagttccagtttctcttccattctgtgtcacagacaccaacacaccactcattggaaaatggaaaaaaaaaacaaaaaaaaaacaaaaaaatgtacaatggatgcattgaaattatatgtaattgtataaatggtgcaacagtaataaagttaaacaattaaaaagaa

SEQ ID NO: 173 - DNA, 3299 bp, Homo sapiens
aggcgcggttgtgagtagtaccgggagtggggtgatcccgggctaggggagcgcggcggccgcgatcgggcttagtcggagctccgaagggagtgactaggacacccgggtgggctacttttcttccggtgcttttgctttttttttcctttgggctcgggctgagtgtcgcccactgagcaaagattccctcgtaaaacccagagcgaccctcccgtcaattgttgggctcgggagtgtcgcggtgccccgagcgcgccgggcgcggaggcaaagggagcggagccggccgcggacggggcccggagcttgcctgcctccctcgctcgccccagcgggttcgctcgcgtagagcgcagggcgcgcgcgatgaaggcggtgagcccggtgcgcccctcgggccgcaaggcgccgtcgggctgcggcggcggggagctggcgctgcgctgcctggccgagcacggccacagcctgggtggctccgcagccgcggcggcggcggcggcggcagcgcgctgtaaggcggccgaggcggcggccgacgagccggcgctgtgcctgcagtgcgatatgaacgactgctatagccgcctgcggaggctggtgcccaccatcccgcccaacaagaaagtcagcaaagtggagatcctgcagcacgttatcgactacatcctggacctgcagctggcgctggagacgcacccggccctgctgaggcagccaccaccgcccgcgccgccacaccacccggccgggacctgtccagccgcgccgccgcggaccccgctcactgcgctcaacaccgacccggtgagaggccgggcgccggccgtgggcggacgccgcgggggatgggaggttggtggcgtggtggcgggacgcgggcgctcaccgtcctccgggcaggggcgggccaggaatgacagccccctccccctgctcctccgggctcccccgggccgccagcagccggccgggctcggcgagcgcgggtccgggagaacgcgcagggcgggactcggggctgtgggcgccctgggctgtcaagtcccgcctgagcccggaggggcccccccggctacaggctggggtgggggcgtcggcgcgccagcctgatttccgaggacaatccaggaccgtgtcgagcgcgttgtttgcgcctgctaacctttcccttggtgttcggttgctgttccaggccggcgcggtgaacaagcagggcgacagcattctgtgccgctgagccgcgctgtccaggtgagcgcgcatttcccgtctcgggtggccggtcaccagagacgcccgtccccgagggcttccggggccaggcaccgcggtgttctttgcccccagcgtttctgagagcaaactcccaaggaagtaaatcccctctctccctgccacctaagtagcaagtaaacccgtacttagccttagaactcgaggttcagtctcggtggagacgggtcagcccttgtccccgccgtccccgtgttttttctggtggtcagcgggctcttctgccttccctagttcccgagggagggcaccctcgtgggcatgggagctgccccggtgtcctcccgtgcagtctgtcacccacaaagggggacgcgggcagggcgccggagtgggtcccctctccgggcttcccgagggccgcagctgcctgctcggcgcctggcccggccgcgggcgggtgttgtctgacctggtggtttgttttgggttgttgatcaagcatgtcttgagtttggtcggtggcgccagttagtctgcagcgagaaggttcacacaccccctctattcattcctcttccacaggtgtgcggccgcctgagcccgagccaggagcactagagagggagggggaagagcagaagttagagaaaaaaagccaccggaggaaaggaaaaaacatcggccaacctagaaacgttttcattcgtcattccaagagagagagaggaaagaaaaatacaactttcattctttctttgcacgttcataaacattctacatacgtattctcttttgtctcttcatttataactgctgtgaattgtacatttctgtgttttttggaggtgcagttaaacttttaagcttaagtgtgacaggactgataaatagaagatcaagagtagatccgactttagaagcctactttgtgaccaaggagctcaatttttgttttgaagctttactaatctaccagagcattgtagatattttttttttacatctattgtttaaaatagatgattataacggggcagagaactttcttttctctgcaagaatgttacatattgtatagataaatgagtgacatttcataccatgtatatatagagatgttctataagtgtgagaaagtatatgctttaatagatactgtaattataagatatttttaattaaatatttttttgtaaatattatgtgtgtgtttttttttaatctatgggaatatttcttttggaaaatcatttttcagctcaattacagagctcttgatatcttgaatgtcttttctgtttggcctggctcttaatttgcttttgttttgcccagtatagactcggaagtaacagttatagctagtggtcttgcatgattgcatgagatgtttaatcacaaattaaacttgttctgagtccattcaaatgtgtttttttaaatgtagattgaaatctttgtatttgaagcatacatgttgaaaatacaccttatcagtttttaagtacagggttttatagtgtaatatatacagagtaagtgtttgtttttgtttttcaactgaggtcaaaatggattctgaatgattttgcatatgggatgaggaaatgcttggatccttaaggagtttacgaaatctgctgttttatcaaagtgaaaaaaaattgcttattactcttcattttacactaaagcttaatgtcactaagtttcatgtctgtacagattatttaaatcatggaaatgaaaaaaatgttctctgcttgctaccaaaggacaaactcttggaaatgaacactttctgctttccttcctccaaagaattaataggcaacagtgggagaaaaaaaaggcataatggcaaatccttcaagcagggataaaagtcgatcttcaaacattaacttaagcagaccaaaaattctgatgaccgcatctagattatttttttataaaaatgattttcactatagctatgttacgctaagctactgtccaatctcttgtgatgtgtaacttttacatgtgaatattaaagtagatttctctgtcttgta

SEQ ID NO: 174 - DNA, 97048 bp, Homo sapiens
cccaggccggctctggcctcctgacccagacagcgcagggcgcgagggatcgcgcggccgagcccgggtcgcgccgctcccagcatcggggccgctagccaagagttcgaggccttcccgatccggatgtgatgaaaaagagcaacagagggagaagtgtttcaggattgtaggagtggaagaggggaaagagaggcagagagggggaaggccccctcgcaggggagccggctggagtgagctggctggaaagagggggcggagtgcgcggagtcagagccgccaccgctgccgcagttgccgccactgcggcgtctgggctgagccggagggaggcgggaggacgcgcaggggcggccgccgccgtcgtcaggccaccggggcgaaaatgcggccgctgccggaggctcgctaactttccggggcggaagaggaggaggaggaggaggaaggggcttggagcgactacggggggatgcggaggtaggtagtggtctccgggcggggaagaggaggggtttgatccccatccccggggttctcccaaacccgatctctctttccagcccctccccgctgggtccacctcggacccctgggaccccgccgctgtcaacttgcgctgtaacagttttcttcgcaagtttcaaatcaaaacttccccggggtggagtttgagggagggaagtggagggggagggaacgtcccgcaggggtggtgtgctcttctctaaaaacatttttttttttaattttgtatatttttccgccagaagcagtcagttccctgcacccagcacctcacagcccttcctccgtgcgccctgccgggcggcgagctaggcggcagcggcgcggcgcgggctcggcggagcggcccatgtccggcgcgggcgaagccctcgctcccgggcccgtggggccgcagcgcgtggccgaggcgggcggcggccagctgggctccacagcccagggtgagtgcgcgcttgcaagtggcaagcttctttgtcattgttgcatttttcagtttgctcacaagtgcacagataggggtggggggagtgctgtgaggaggggctcccactcgtagttgagaacttttgcacagttcgcgttactcaggcaagttcttcaggatccttgccctagatcaacaaccgggtaagagggcgggaaccgttggtccctccactcccccttcctttggttgcgaagaaacaggatgacaggattgcttctttcttaagcatatgcatgtttgggcctaagactcaatgtgtaggttctgaagcgcttctcctctaggtctcttcagcagatccaggactgccgcagctctctgaacaagcgtgcacttactccatttcatctttctgtttcttgttggctcctctaccacccggttgataattcaggtttctgtgaccagtagctttggaatggcttatgcttgttttcaataactggtttgttttgaaataaataaacaaggtttataagaaacactttccaagaatgaattagcttctttgtgttcttccaaagtgtaaacacacacagcctataaaatactcttgtgtctgggaaacttccataacaagcttctaaacgagttgaacctttcttctcttgaaggcaatatactttaggtttccattggtgacagagaggaaggttcttaaacttctaatgcattttactctaaggatggttttgagctaaagaattctgtcactgatatatcagaactaagtaatttttccagtgctcaaaaacctagcatatacccctgattttaggcataaactgatagctttatttcccacttgtactaatgtagtgaatcttagggattttttttaaggcagcaaaaattggagaaggagttaactttcaagctgcaataggtaaaagcagaaaacatcttggttaaattaaaatgttctggcacccagggctgttaaactgaattacatttatcattattttttgcctctaaatgagtgactcagctttctaaacagaaaataaaaatgattaactgcagaaaatcagagaactagaatgataaacatatgttttctgagaagcagcccgtgttctccaccttgtattgtcagcacaatcattttcctgtcattaggcatgcccttagtagtcatatcgactcattgatgggctgtttatgctcacacttgagctgctaatcacaattgttaaaccaggcttatgtcaaaaatcaacatcaaacacccaaggaaaataatttgacctggaaatagctaatatctacaatatccaactttaatagtttgcatttctaaaatcatctgggagaatgtgcagtggtacttaatgtacctgtgcattaggatgctggatggtgtcatgtgatctgaacttaagaacccgaaaatctagagtggcctgaagtacatttgttgggtacaacacacgttatcagtgtagaaactcttgggttatattttacctgaaaattgccttagctttagcaacatagttatacatttttattattattagtttaactttgatccaaaactttctttaaatagggatcagtttaatttaaatataaagttgatttttaaaaagagagtctgcagaatcttgttaaaatatgatgtcttaaacaggcagatgtcataaggtgtatttaaagaaagaaattcttggagcaaatggttagaggaaagcttcaagggaagcttggttaggttggttttattgataaagacatttgtgaagaagctttgctcgaaggccactctactcttaagccttttctcaagttcttttatcctcttgcttctgtccttggattctttatcatcctttctgaagaatagcttaataattctacggtaggatatggctgcttagttaacagaaacctaatttttaaattctttatattaaagtcagtaagaaaagtggaattttaaatacaaattaacagaaaaaaatattatttcaggaacatgaaggatatgatcaagtctacccctgcaaagttaaatatatatatataggtaaataatgacattacaagctctacatttattactatactatattgtgatgagctatccatactgttaaccaaaggcatgaaacattacagttgaaagtaattttggggattctctaatctgaactccacatcaagtctaaaattcaattctacatccttttaggtgttttgttaaaaacctgtagtgaagcccattctagtattagcattaagaattagaaaggttgtccatattaagagcatactcttcctccttaaagtttctacctttttgttgtggttctgcaaggctttctattgttttgaaagcattaaaaagcattacaaatctttcccatgtgttttgaaaatagttacagagcagggacataagcttacatgctccaggctgtaagagggaaccaggatagatgtcagacagtatggagcaatggggattttggggaactggagagctcatgggccaggaaacaacattcctcagttttagctaattgttgccatgtgggttagtatcttcagatatttcaagtgatactggaaatccagatttttatgtatcatctctccatttttaagagtttgcaactaattaaacaccaattttgtgcaggccaaacaaaacaaccacaactgtaggctggatatggcctctgagcagctaatttgtgatctctcatacagaaaatagaaagtaaacatgtaatttaaagctatattcttatttgttactaccttgtgaaatattgatttactttctcatgcaaagtacttgtatacatgtcttgataggtgaaaagccatttcagttatactttattttaagagataatggatcttgtttgtgtggtccctgtaattgccatttgtcctggtttgattaaacattttaaaattcgtgttatggaaccacattgaaaatgtaagtatttgccctttggtgcaatagttactagaactcctataatccaaagagcctttgaattaagtgcttctttcataagtatgggatttgtaactagaggggtctttagaaataatttaatccaacccgctcattttttaaataagggaaaggatgtccaaagaatttaagtgacttgcccaaggtctcatacacagtcagtagcaagaaatcagggtagaagcacaaattataacataaattgtatgtcattgtgataaatgcagttgaagtagagaatcagttcaacttttttatagggctggatgcattgacaataggcttgggatattgtgaatcacttgagcttgttcccatccctgtatctttcccccaaccccccaagacattgcatttgtcaagacgtagatcgttggactctgagtgctagaatatattttaatgtgataatgtgtgatttaatgcactcttctctcttgggagagtcctcttgagactattaggcggacttttcttagcaggatgcaaaatgccagtgaagttaattaaaaataatctaaaatagaagctggggagaaaatcaagttgaaattacataagaagagctttgatttagaagcttagctgagttgtcagtagtttatagaggctaatcagattttctttttgggaagccagtttatttcaatgtatataatgtatacttgtacatatctgtattcttctatttttatcatattattttatccttttgattaaggatggcatttcacaaaatgtgtcatctttgaacagcttctaatcctggttctctactggggacaattttgctcttcaggacacatttggcaatatctacaggcatgtttggtggtcgtaatgggggtgctactagcatctagtgagtggagatcagggacactcctgaacattttgtaatgcataggataggacaacctttacaagaaagaatcaccagtaatgttgagattgagaaactgctatccttgaggcaactgacgtttttggtttcatcccagacttatagaattaggatctctggatgtaagagccaagaatctgcattttaatcaagctccaggtgctccttaactctagttgagaatcattgttttatgggctttaatctctaaaaggatatgttatagtgatagacttttaaaaacagtccttttttttttttttggagggaaagacttcagaaagctttttaaaagttcaccttttcaagttccaaaatttaaattgttatcactccatgtaaactctctaataatcctctctaagattttttgtcatacgcttcaattcatcctcaaaatactgctgcatagtcatcctcaaaaaagcttatttattttcataattatatgcactataatacaaatatatttttaacaatataaaagaaatgcaaaagtaaaaattaataaggatgagagactaaataaatagaattttaatactttatttcactatttcagtagatattcttgctaccctacactttggagactccaacatatggcaaaacaaggaaagaaatctccagttttcacatgagttgtgttccattgtaaattggacttttagagcctggattctactttctcatagaaacagagggataaattatatttagttccctaataaaagtcaaaagattgttagaattaagttttattaaattttgtgtgcttttaatggtaactcacagaaaacatactattataaaactggcagcaaatacaaataaccaagaataaaattaaactgaatagaaattggtttaaaacactttttgaatacagatgcttgaggaaggacaagcttaattagaaaaatatagaagggcatgtagatttgaaagaggatttgggaacattttgaatttagaaaatgaatcttagaacttatacttctaactttttatgcctaaaggaactaatgtacattttatgattttagttatacaagtggagggcttatcagctgggcatattcattttccctttgttaagaaaaagaaccaaatgagtaagagaagaatgtaactgggaaaaaactaaaaacagaggaaggaagtggttaaagaagatatatctgtaaatttaagaaagcatttggagaggttgaactgtttaagaactgtgaaaaaaaaaaggtctacggaatagcatggtacatgctgagcctgtggctggcatgttaaggaaatcagtgccatagtagaggcacaaagaaagtgtgatggcagaacatgggcgagagaaaatatctctagtaggggatttggaaaagcctcaagaaaagttttgatttgagttggaccaggaagcatagcatggttgtaggactcagttctgtggagataagtggtagaaaacaaggcttgggggagatgattacagaatattgggtacttcaccaagaccattgttggggctgtatgaagggtcggagaacaagatagcctaaagtcagtttcaggagggccctgattctcttgctgaggagcttgcatatctcttctgtaggagttggtgaccactgaagtctcttaagaagaaaaggacaggaaccacttgtgtttttaggaaaactgttctggtgacagttcatagaatggttttggaggaagaagcaagagtggaggcagtgattataataggctgacaaaagattagaggacttagggcagcaccagtaggagtaaaattgaggaaattgatttaaaaacaatagcaaaaataggatagagctttactcagctgtgagaacccctgagggaatagatttttacttattcatctttgaaactcctgagaccaagcacagtgtccacattttgatgaaatgatatggttgggtaaaaaatatagatatagatctatagataaatatagatatagatctatagataaatatagatctatctatctatctatcatctatctatctatatattttgagatggattcttaccctgttgcccaggctggagtgtagtggcatgatctcggctcactgcaacttccacctcccgggttcaagcgattcttctgcctcagcctcctgggtagctgggactacaggcgtgtgccaccaaacctggctaattttttgtattttttagtagagacgggtttcaccatattggccaggttggtctcgaactcttgaccttgtgatcccctgccttagcctcccaaagttctgggattacaggcttgagccactgtgcccagcttccattcctttttataatggagttaatagactgccagttaagggacctgctatagatatggtgtctctggattttggcaatcagacaacatctttaatgatagttttctcgcctagccggtggttgggtaaaatattttataagggagatggtggaaaagtagaaatttaaggtaatccataagtttgctttgtagcctgagtggcaacctaggaggagctgttgagtcttcttagtcacaggagcattggatatttggtggatacaaaagatgaaaagagttttggtttgtttaagagaaacagggtgcatggaagacttctcttgcttggatgggtggattgaatacactcactgtgcactaatgagaagaaagccggaagttagagagaaaatgaagatgaaaggagatggaggagggaggaagtggtgcagtaggtgtttgtaagggaaagataaaaattctgggatggaatgggatgaagggaccagtctttggaaagttgggaatattcctctttgagatggaggtgggagaaaaggataggtgataatctagagaacatttgatgtgaaaatgaatattgagggcctagatctcagcaaagtaaatggtaacattttctgagagcaaaggaggttaggatgaatcaagaagtttgagatgtctggaaaagatttggaagagggaagaattaaagggatagtcaatctggggcaaataaaatgcctgctgggtaacacaaagaaattaactaggactgaatggcatgaattcttagtggaagtgatcagcatggttgattgtctttctcagccagggagcatgcaggagcttgggaagggaagcagacagaatggattttgcaattagcatagggttggaggttggcagggtggaagtgatgagaggatgacaagtgacaagggatgcatatcacgcatgtgtgggaagtgtttatgttaaccggtcttgtattccaggctgggaagagaatccagagaccagaaatgcaattgacaggctaagacctctggcgagaaaaaaaattgtggctgttgctttgtttggtcagttcacatatgaggatttaatatatatgattgagtgacctttacatggctatgagggaagctgtggaatttttgggtgtgtaaaggcttttcctgtttctttgaacctcgtttcctggatcttgttgagatgatttcatggaaagaaggcctaataacagtgtgcaattattttattggattatgtttctataataataaaaggtttgggagtaatgaggaaacatcaattgacaccatctaaagttaggccatatgcaaatacaaagttatttagaacaacaacacatggaacagataaaaaaaaattcaaccagattatctttctgagacaatgtaaatatttttctgtacaaaggcagaggataaatcgtgatttctatgtttctacttctaaaagcattcagtttttattaagagaatacattctgtactgactagattctagattttggacaatttaacttcagtgattcattggagtagatcaaagaaagttgctgcagcccttctgtcttaatcagtgctatgtatatgcaccagtattttggatacttgatctctctctctccctccgtccccttttcctcctccctctctctctctctttgtctttccagtaacactttattgaagttacttaaacttttaatatctactttttacattagcctacatgtcctgaaggaggaaagctttttaaccttaagtttttgaagtctagttatattttatagattcttcttctaatcacttagggtttgctaagtagaaactatgagaagagttattttaacatgaatttaatttcgtttgtggtttttacttacagtctacttctgttttcagattcacgcccacatgatctcaagtgagatgattcatatacatgtgcttttatgcccaatttttggtagtttcaggaataaagtctgaaattaatttttatgctagcacatatattttactatggagagatttgaaggggaaaaccctgcccacaaatatttttcggtgtgcctacaaggtcctgcgaaaattaagaatgtatagttttgcccacaatgaatttctcaacaggatgagaaaggataagacacaaatgtttaccaaattaaatttcagtctcttactgaaatatcaattcaagattaaaataatagccatgtgacagattaatttatggccagatgccaactaactggtatcatcctggagcaggaaaatttagaggttgagagaggatttcaggatggcgagaaggaatcagttttgtctaagttggactgctagtgtccatagttgaagaatataccgtttgtagggttttttggtgagaattatgccgtgttgagccttgaaactaaggtatcttgtggtcgagcaggtgacaggctctctgaaactaggtggcagagtatgaaggaaccagcttcctctctttacttttgccactccgaggcatagtcctcctactctttttcaaggtgaatccgccctgatctttcgggtgtttgtaaacgcagacgctgcttttgggtttctataaacatagttcttatttctttcattactcaggcaatacataagatctgaggggttgtactatttatttctcatggggatacaagataaaattattaagcgtgggaaagtataggagtttacaatataaaatattctaaaatatctatgttcaaataactctatcagtttttcaccaatatgcaaaatggatataattcatacttcagctaaggagtaacatatttgatcttggtgttaggaaagtatttttgattggagggtaaagagactgaggcactggtagtgggtgtggaaaagaaactatagatttgcgagaaattggggagttgttactagcaggatctggtaattgattattttggaataggcgacataaaaagaaaataaagagttgaaggtgattctgtaactactattagctaagacacagacaacagttatagaaacagacaggaagagaagaaaagtggtgatgaattttgggaaatgttgagtctgagttgctaaagatatatttatgtagagttaaaacttcaaatctgtagctcaagataggtgtcagggctagtaaaatggatctacaagttatctccctgcaatttactgaaactgtggaagttgatgagactgcaaagatggtagagccaaaagaatataggttgtggtcttagaggagaatccgaagaactcattgctctacagcaagggtggggaggacccagaaattgagaggctgagttagtgaagtttataagttcctgatttgggcctttacaaaaattgacagatgacacaccttctgatttcaatttcatatctaccattctgaagtcccagaattcaatttcagtatacttcaaattcacttacaattatcttatttgtgcctttgccactatttggaaagctcttctctgtcctctatttatttaattcaatatcagactcaaagcataactctgaaatgctcttacagattaaacaaccccctttgattcaattttgatttccactagccttcattcttgtaatagtgccaagtaagggttctttgcttaactagagagcttgagactaaaaatgttcttcataaaataactctgtataactgagaggtaacaaaaaggtttttaaaactgtggtgcatatgcaagttatcatgctgaaagactaaagatgggtgtgaatcatcatttaaaaaggggaagatgatagagtgttccattctttttttttttttttttccttttgagacggagtctcactctgtcatgcaggctggagtgcaatggcgtgatctcggctcactgcagcctccgcctcccaggttcaagcgattctcctgcttcagcctcctgagtagctgggattacaggcatgggccaccatgcccagctaatttttgtatttttagtagagaagggatttcaccatgttggtcaggctggtcttgaattctgaaccttgtgatccacctgcctcggcctctcaaagtgctgggattacaggtgtgagccactgtgcccagcctccattcctttttataatggagttaatagactgccagttaagggacctgctatagatatggtgtctctggattttggcaatcagacaacctctttcatgatagttttctcgacaagattaagaaggctattgcgtctataagagtgattagaatgtgatgcctctgaaaagccactgaatcaactgagcatatttagcacagagaagacagaagaacatgagatactttctaatatggcactgtcacatggagagaagattagactttgatttttttactttgattttgcaaaaagcaaaatgtgatgaatcagtgaaaattttagggaagtagattttagccaaatgtgaggatggtccgaataattaaaactctgaaagtggaataagctattttctgaggctgtttctctatccctgtaagtattcatacctacagtccttggcctgttcttgggaatgttggacgtcgaatgttttcatctgaatttattttatcagcttctcagagggacctgtgagagcacatctaactccagatttcataagcctatgaatgtttggctttagtatgaacatattgtttggctgaataaacatagctgaaactgtatgtgagaaggaaggagtttgctgtgcctcaaggtcaatcatcctaaacatttattgttggggtaaggtacagtaagtttagatgaaaaaggtgcaagagactaagatgactaagatgtgtcctggttcctcatatcagattgctgttatccaagcacttattttcttaagtggaagtacaggattcttccttctcccttcatgaatttagagccctgatttattgagatatattttaaatgattgctgcactttatacctattccttcgcatatttatactcaattggattttcatataattttgtaatttgttttctaatttgctgtgtacatactccattcctttcacctatcccaaacctataaagtgattgagtcagtatcattttcccaccattcttttgggtctaaatataccataagcttctaaatacataagaagcccttcaaaggaatatattttagatcttgctcagaagtcttattatttttcagaatactgataacaatgaattaaattacgttgattttagcatttgatttactcaacaaacatttatagtgtatgattatataacttccttgtgtttgcacaatcttgaagttttatgcatatgttcactcatctgtttaaatgctttggttatcttaatgtgtatttttggacaatgcatttttaatccattttagaatgttaggcaaagtaggttggttttgcaatgttccttaaaggtcattaggcttgagggtttttttgttttttttgtttttggatcagtgaagaagtaaaattccagagcctcaggtcttcctgaaagctgccttatctttggttttttaaaggttacagttgggaaacattagcagaatttccacattattctgaactgctgggaaaatacagacctagttttttttgttacttttcccagagattttagtctcagattacttgaaatttcataaactagaatacatatcgatcatctgtaataatgctggttttttaatggaagagtaaatatgaaattgtttaaagcaagtttgttatacataagggaggtatgaatacaaattgcttatcaccaataacaatatacataatatgcagattataaatgctctgtcatagattattatcaaatatttaattgaagtgtatgagagctaacatgcaaaagtctcaaaatttaaacacaaagagaactagttatactcctttttataagactatattttacactgattaagttttatgaggttttataaagattcctgccaatcaacataatttgtattagtctttcttgaagtaagcaaataaagtatgggtaacaagtagaaaatgtatttttctttttgtttttttttggtttgtgagtttacacacacctctgcctggttcagtagaatatttgaggtggcttataagaatactttttaaaaaggattaaaacagaataatggtaaatataagtagactaggaaacccaagtccggggaaatcagaatatataggtataggctgtggggtcaaacacagttattcaattttgaatgtagatgtgcgttcaaaagaaaacttttgggggatatacttttcgttgtctataaggaaaaaaaataacatacagctactcagaggaaacaatacttttccttgtatttagtctagaaacatacttattgtctggtttttcatatagagatcactgaaaggatactgccctcaccagcctccttatgatttatttatagcgtgttttaaaaaagtgcttactgcaataacacttaatgtaataataattgccagtgtgaatgagctcttattctatatcagacactgtgctttcctgtcttgatttcatttatttccacatccaccttacgaggtagagactgttgttattcccatttaaagttgaagaatctgacaaagattaacttgcccaggatccacatcattagtggtggacccaggcaccctgatttttgatcctttgcttttaaacacttctctagtgcagagtaaaacttggtgagagtacttctgtcccagagacactaatgagaatcattttattcgtcaggaaggcttcaagtatttggacttttaagtggcaatattgcccccaatatttttggaaaactgtggcatgtacagaaatttgaagcaacattctcaggttcttctgttactataatattatttgttaaaagcattcagttatggagataatattattgcttgattgtaaattattggaaaaatatccctcttcaatagtttgaacagttgtcttatagaaaaggtaaagtgtacatttctacctacaaagggcagaactaagagtagttataaatgacttgatagcagatttatgtttaaaaaaaaaagaataacttgttaatgcaccaacctgaccaagaataaaagttgttcccttgtgaagtagcaatccttgaaattttggagaaaggctgagtattgcgatagacgtttctacactgggtgggatgtgaaactagctgagctgcagaggattttatcatcctgtttccaactgaatatctatctctgagactgttttctcatcagtaaaactgagctaagtttttttctttattgcattgttgatggttctgaagatcaaataaatattatatatttaagtcctttgaaaaccattaatattgtaattgtgaacattgattaatttattctttcaacaaagaaaatttttattttttaaaaacttatgtaacaaacatattagttgagtggctattatatggcatatatcatattttatatgttattatctaatttattattaatgctcttagatttttctctcttgctaatcaccatcttaatattttattccccaactgttggagacaagtaaaactaccaagttttaaatttagataatgccaactaggtaaaatattatagaattttaaattaaatggaaattctatttacctgaatatttttcattctcctttaccaggaagaattgagattggagaagattgtttcttaccattcatgcccttctttagaaacaggaaaataaagggtattgattctgtaagatggatagtcatttctgagtaggacatattgtatttaaattgatcatttggaacctttagtttttccattttctcttgctcaattcatgtttgtcactttctttgagaattaattcaaatccaatgccctacaatggcttttctatgatttcctctactccattctaaacactcttccttgtgtatatgagagtttggctctattgtttagctcttgtgaagaatcagatttgcagaatttttgagccagaaaggcttcttcattcatccagttcaaccctctcatttcctgatgaagaggatgaagacaatgagtcccagtcacacagatggtcagcctttgagccagaattatgacagagcagttgtcactaccttctgttttgcagttgcttgattgtttatgtgtgtgtgtttggtcttcccagtgagaggatttgttgccagggacctcgcctttttcctcatccaaagcaaagtagttcttcctcacttctttgtccagagtaaacatactaggatgctcaggagctagtctttggaagtagatgccagtggtgttcaactatcctttaatctagtactatttttaatgcatcttaaatttttattttgatatctaaaacatatttcttttatcccattattagtagaattgattagcattatatataattcagatttcatatatatgtatttttaaatgggatttcgctcttgttgcccaggctggagtgcagtggcgtgatcttggctcactgcaacctctgtcttcccggattcaagcaattctcctgcctcagcctcccaagtggctgagattgcaggaatgtgccaccatgcccagataattttttgtatttactagagatggggttttaccatgttggtcaggctggtctcgaactcctgacctcaggtgatccacccacctcggccttcccaagtgctgggattacaggcgtgagccaccatgcccagccagattttgtattcttaatagttatccttacatggagacagaaataaatacctctatattaattagatgattagatacaaatctattttctagtacttggaatactgtgacaaggggatgagtagcaaagtctgtatctcaatatttgatatacctaagttttttttaaatataaatagttgtgtagtacaagataagagttcacttagaatagtgcccctcaagtctggccatatatcatgatgacatcactgccccagccccatacacacttgagttgaaatctcttaggttgggcctgtgcatctttatgtttcaagagctgcacagcggttctaaccctgagccaaagtagaggaccattggcttagaaagacagcattgttgagataatgaaggcccccttttaagagaaaattgctactttgggttggggggaatgtatgcctgttggacatgtaaatagaaatcttatagaaaggtacagactgatttcatatgtgactgaaatcaactgattgtctatgggttgtctttcaggtctaccctactagttgagttgcaactacaaacctccattatccagagtgaaatttattaaaccagggctgagttctttgtttctcatttcagaaataacatgaaaaacctactctgataatagaaattggttactagaaacttccattttgttattgtaatgagtagtggctgactcaaccaattgaaagctttagtaaggttggtttcatgtttggatatcatgatccccatcttacaattatctatcaataaatcctgctccctcttcagagcatttcttcagtgttatatgtaactgcccaccatttatgagactgccatatgggtagctcattgaaatgagtaaatagtaagactatattaataaaataacatgcatatattagaaagtcacagaacagtcaagtggtcacagaagttttgtttatacaagtggagaattggcaaaagtcaatttaaatttttttattgggaaccttttctgaatcttgctttgggctgggtgctgcggatcacagcaaaaccctgagaccagcttttgagccaagacatttagttttcaagagaagcaaagttgaatagactgaggatagtgaattaatagtaattgcatattatttactattcattgaatataatcatacagagaatgatagtctttttcttttttgacctgagatggacactgggaatcacctaattctagaattttgcagataaggaaactttcttaaaaatgtgataaattgtccattaataacaatttagagcaggaagaactttattttttgcctagagtgggttatatagttgtgcatctatgtgtatatggtccacatggcattttcatttattcaatggagagttgagagggtctgtgtttagcactcgaatattggacatgattcaaatatgagtcaagtgtgtctagaggctttattcatacctattttcttttagtcagcaatgcttcataatgccttggtttcacgaattaattttaatggaattaaatttgaacagctcaaaattatataattaatttcattcagcttcaattaaagttactaattgaatcaagcctactagcatgacacctggcggcagtcagctacataacaatggcagcaagtatgtaggactctgctgatgagctagttcttgcctactagtgagtttccatgaaaaatctcttttattgataatctcagaatgaccttgagttgactgtagcagtaaaaagatttctggagttgtttaaaaaagtaaagattttaattgaaactaacatatctcatgaagattacatttctctatgataatgctgagtaaatgttacataaatctagaacatattggtttagcatattttcaatttatattttactgctatttgaatatggttttgtttataaaaatccttggaagttaagaccccatttggttcagagaccttagcctctggactcggtcccaagtgggtgtctctctatttttatgtgttgaaatttgtttcatggcagaactttttaattgttgtgaaatccccatggtacatgaaaaatttttgcatgtgcagaaattttttccttccactggaaatgttaacacggttgactaacaacttctgtttgaatctctttcctttctttgcttccatggcttgacatcatgcagtttttcttacttctctaactccttcctaattgtacggactcttcttggtacttggtactcttcttgatatttcttaatatattcactctttcagtgagctcattaatttgaatggctttggaaatcaagtttagaaagatgactatttctagctataaccttttttctgacttgcaaattcaaatgtccaatacttaattcatccactagactgtaaactccaagaaggcctgggcagcatttcataagtcattgtatcctcatcacctagcacaatgcctaaacatctactatgcaaaaatatatattattgaaagaataaattggtctcatgatttttaggctttcccagtcaaatccaaactgagaacttggtcatatccaaccccatcttccttgataatctttacaaacctctagttagtttctcacatttactccctattccatcttgttatccagttaattaaactcttatcaacttcaatatgggctttgctaggtctctcttttagtttcccttactgtattctccctcttagatgtatccatactccattggaatcatctgagttcagcctcttctccctcagttgaaatagaatctttgattctggtatccagaaatatgttttttgtttgtttgtttgttttttagttctaaaaatacttacaagaaaaaaaaagctcaccaagtgaattaaagtgaagccagaactgagaatcacaagtgtgcacaaatttattaatcttcctaaggcgtggttctgataaggcatttcataaagcttcagtggctagtttgacttatttttcttgcttttgaatttcatccagatttctcaccttagcattctaatatccacacaatgtctctaatcaaaccttcgcagtcttctgtcctaatttgccactcatagtacttcacagtccagagagttggaacctttgcccaaacgtctgcttttggagtttgcccgtgctgttcttccacctttctcccatctggacttttggaaatccaactaatcttttgaagtccatccaacatgtatcattttcttcagtgcttttcttgatctctgaatcctgatgagtattttttcttcctttgaacctttttagtgctctggacctctcatagcatgcattataccttgttgccagtttgcttttggcttgacttatgtgccccaaagactttacatttccttacatgttggctttctccctgagaacccataaacccacttgcgaatctctcgtcctaaatacccccttctcagaggatgcattacacagtccttgactttttcttcacgttctagagagagaatgctgtacttgttttctatacctcctcactactcagtcactcctcattcagctgcaggccgactttcgtctctaccactcatcagagcttcttctctttcacccctttccctgctgctcaaccccctacatgcatggactcactcactttcatgcttcctgtaaccttttcacatttctctatcatggcacatcacttgctgtgttaaaattacttgtttactgtaaacttaacagattatttttaccatgaacatctctggttctttaatgccaggctgatagtaggtgctcagtaaatacctgttactgagccaataaaataggcagcaggcaatagaggtatacctgttctatttccttaaattatggcagacttggaagcatttagaaaaatgtatatactaaaaaaggagagaaaaatatataaaatcaattatattaaatgtatcttttttaattcaggaaaatgtgataaagacaatactgagaaagatataactcaagctaccaatagccacttcacacatggagagatgcaagaccagtccatttggggaaatccttcggatggtgaactcattagaagtaagtatttttagaaaaaactttgagtgattttgggatatgactatggtaatatattcttcgttaattgccccagataattctgctacaaatccgtaaatcaacagcgtttatctaaaagtggtttcatttgtattttaaattacagagctaaagctaggatatacataatgctgtcagtgttgcctttcttcagaaatgaagaattgacgcgtaaatattgaactcttctcagagagattcagtcaaaattcagttcctttttgagtaacaactaagtggaagtcaaacaactctaagtatatgtggatggagaaactaaaaagaggaagatggagctaaaagattaatgctactatggtctctgttcttctagctaactgactccaaattttttttatgattaatattttatcactgtttgttaaaaaaattttttgtgatattcttcttcctaaaattgcatacaaaagcttcggtctattttcatgttattctttgaatgccctgcaataccttgtcttttgggtgctgatcagaatgctgagtccatgtggggttctgctctcgagctcctggagtttacgttctggtcactaagttcccctaggtgtgttcaagatgaatttgccatacaatgaattattcgacatagcaaacacctaggtgtaaagattgctgctaagccacacctggaagagcatagggagtaaatcttttgatattcccctttggagtaaccaaaataccatgtttccttctcagtttttcagagtggatggaggagaatttacttctgggatcaaatgtttattttatgtttaaaaacttatttctttagtttaagtaacttcatactatagatcctttacagtcttccacattacacttactttgaaacttagaacatttctttcctctctagaatgccactacctgtctctaactgaaaactaaacaaaataaattagaaaaaaaaaggaagagggtccaacttaggagaaaataaacaacaacaataaaaacactattgaaggaaatttccaggtttcaaacaaaagctctaaaaatgagtgttttaggttaattttaggaccattttggtttttatacactttggtcttggagaagggagtaggaaggaaggaaatgagactcaggaattagtgaggaggaagatttatatagctttatccaaagaatcatataaacattatttcaagtaaatatttatctgaaaaacatatattgattagcatttatctaatattgactctgctattgtgaaacacatgattttgtggaataactggcctatgttatctctgacttcctagcaaccagagttagtgagcactagaagaagttctagagacaattttacctctatctgttgggaagcaaaatggttttctcacttttttttcggtggtaacaattttaagtgtgtgcttcatttaattggtttatttccttaatctcttttcctagggcccacaataggaaaatgtgaataagatttcttagaacaacagcaacaaaaaagacaaacactattaaataagaatatggagagtcatgctaatgtgttaaatttgtttatattatttggtgaagctcatattagtcatagaatccataccattaaaaagaatgaattaaaatgatttactctacggtttcattggttaagtgggtaccaatctaatatattgtaaattgcatgagtttctttattgagataatgacgtaccctgtgccatgggactttggaacattaggaaaccactgtctagtttcttactaatattcactgaaggaatgaagagatacagaaatttacaccccctctgaaagggctgctggggaaactgacagtttgaatggatttacaaaagatactggccaaagatagcaatgccactcctgcctgaaacataagctggcaaatatttccaaatatttgtgggtgaaatctgactctgaattttgattataaatttcaaaaactccatttttgttattttcccagtcacacttttctagacaaagtctactttgttggatcaacagaaaaaatttgatatctggattttgcagaagtggaacattttatatcatctttaaaactgactcaattctggatagcatttgaaagttttgtattgtggtagcttctgctattccaactcctttgatattaaactctcagagctgcctgactttccttctttggccttccccacagagtcattggccatctctgtgtaatttagtctgtctgtcttaactctgaagttaggaagatgtgtattttcctcttgcttaagcatctcgcacattttgggggcccagaaactcttttgtaataacaataggccctggaaaaggagactctggctcagagcttcatgggaggaggggaacatctgtgttgagtcaggcccgagctggctccgattccaggagtcctgtgtggctctctgagcaccgtggaagaagcggacagctggctctcacggaattgatgttagtgttcccactgtagcgcgagtttggctgaatagagggatcatcagaaaaatgaggctggctggggtgtgggaacattttcaaatgcacaacccactctttttccaaacttccatggggcagctcagctgcatacgcaagaagtgaaggagacagacgcggtcgaatgtgacttctttttctttattcttgaaagtggttagtgagggcttggcagctcgtgtctccgttgtgccggatggctgctgccttctttgccggacactcaaggcataatttataggggactgttagctgtcagtgtaatgaggctgtttttacttttctttgctgagaataactgagctctggaaagtcagggagtggctgctttggaaattgtattctaattaaagggtgtattctcaggcctcataagggatattcacgctgagaataatttccaaattattctatgaactttaaccctgaccttagcggactacctgcttgaactcatacttggttcatgctctacacagaagtttgtacttagtctgctttccctggtccacgtagaaaacattgcaggtggaagacctggggtattatggtttttcagggtgcggatttcaaattggttgcccttgaattgctaacatattacagagaatacattatggaagtaataaataaaaagaagaaactcatatggaatcaaacatttcgaataaataggccacacacaatctggtcagagaacgcacattttggttctctttcctatgaaatttaaatttaaaaagacaattccaaccacttaaatttgtttaaaaatttccaaatcaaattagtaaagaattaaaaacaatggaggttttatgaaaaaagtttataattggaaattctctttttttattttatgactttttatcctttttacatttcaaaaggcttttatactcttagaacataatttggtgtataatttaatttctgaaaggtggcttaaattttggaatttataagagcaccaactaagcctttggcttttcccctcagattagcgtatatggtataattgaagctatgccctgttttaattgtcactattcctctgacttagtaaaataaatgttacagtgaagcgacaccatcaattaatattaatttttctatttaacccgtaatatgcataaactgataacaggcaataggcaacatttcatgttttaattagacaagaaaaggaacagaagcaacagaagcaacattttgatctcagtctttgcggggatttctaaggtaggaagaagagtgtgtgtgtgtgtgtgtgtgtgtgtgtgtgttactgtgcttacactcaggcatgtgtaatattttcctttaatttaggtcaaattctactattctaattatttcctatagagagcttacatttttctttgttcctctttataaagtgcctcaggtctctatctcaggtttttctaggtctttctgaaaattcttattacttaactttatccttggacattgcttttacataaacgtctgctaattctaaatgtcattacttaactccagaaattttccttagcttctcttctgaaataaatttcccattaaattaaactattttgttcagctaattctctcctttgtgattttatagaattcccatgatctgaagcaaagttaaaatgctctacttaaatggtaatccccattctatttaacccatttattcattttgaagagtttttagctctcataatagtaagcacttaattggcagtagaacgcaagctcttctccggctcacacttgctcacccttatggagctgccgtatcatgccttttcactcatcttgctgcttgaaacctttctcttggcatcatctgcaattgctctcaacatcaacaggctctgttattcggagctctattatttcttttcctagcctttgccaacttaatgcggatcaccccttaatgcataccatttcatcactttagggaatgcctcctttatgtaaaatactgaaagaaaagcagatactcaggtgtgctatttatatacttagaacatttttactttgttggtaagcaaagagcattaagaggtttgtattaagtttatttcacagctctcatttgatggcacatttcagtaagtgttaatttggatttctttagaattcactttatatggaaaaggtcatcaaccagcccctagataactatgacctagttaagactggaagatatagctatcatattatgtttcttgggtcatctaggagttttttccctaatatttcatgctcattcatttttgggggcacatattggaagcaaataattctgacttttgccttgctcaatgtcttttcctcctccatttggctctcagaaaaattctctttttattcagtatgttggacgttatgtgactgtagtacacatgctttgattattgttttagaggaggatctttatggtcagttattccaaaatcaaaccaatcgtttgggttcaagattgggtggataatcctaagtcatttttgatgggctcctgtatttatctcattggtcaatggcagccattaggctgtattctagcatggaggtcaagttacctgacacacttcttctcaggctccattatttcatcctcatctggcttctgcccagaagctggggagaaccatttcattttgagccgatttttgtttggagcatttaatgttctggggctaagaggtcaatggaaactgacttccaggagtcagaccgtgctgcatcattactgctaatgctgggccagttacctacctctctgagctctaacttctcatttttaaaagggaggtgctaacattttatgcctcattgtcattttgatgattatacaagaaaatgcatattgtatgcttccttagcacaaagcaaaatgagtaagcacacactgaatttattggttttcattgttattatccttgagcccagctattagttctaaggtttgttttgttttgttttttaagttcatcatggctgcattgagttacatgtccagacaggctggatccaaaaggtcatgtctttctgagacctttgatattgtctacaacaataaccagcacattgattgctgaatggtttatgcttaataaatgcatgatgacttaagtgtattgaattaataagggggagggaagagatgctttacctaccttgcctctattatttcagacgttaaggtcctgagatgaaggttctaaatcactacagtattccatttattcttctaactcccttcttactcccaggctgcacgtggtttattcatgtcaagtttgaagtatgtatagatgacttttatgatattaaagcaatcaagttctaaatttgactatcgtttactgataaggctactttgaagagttttcagtgaagttcttatggtagtgctctgtataacattcattttctgaggaggtgaataggaatgacactttatttatggccttttttgcatccgatgttccttatttttcttgcctacccataagaaaaaaaattcgagacgaccttacttccctccctgccttttgcatccctccctccagcttggatggacttttcttccatccttccttctctccctcccattcttttgtcctccttttcttcctcttttctttttttcctcttttcttcttctttctcatattattctctgcctttctaacagatgtgtgtaatcctactgcatatatagatattgttcatcagtataaaggtatatataatgaaatccattactatttaaagattgtaattggtaataaattccttctcatatttacctctagttctctggaattgtaaattggaatttgctcatggattttaatgagttgtgaaatgacaagttatatacaaacgaatttgcagagtgtaagaaaaaagagactgctttacaatttatggaagtagatgtttctatgtatacttctctgtgtttcctccaaacaaagcttctttttgtgtttttctagatactttccattgtgcttaagtgatcagatttgttttcgtgaagattggataagaatatttttaaagtgctttgtataccataaagcacaatgtgtgttgttattattgtcttattattatcattaatatcattattctaatttattactttacctttcacttttattatattctatgacatttgatttgtaatctatatcctacttcttttgttaaaggtttttaatctcttcctgttattcctaaattatttgggtcattattgggggaaatgagatggcattaaagtgtaagtagtggacaagggctcagtgaggaggtagatttattcctctcctattggagagtgtttctgagcctcaggaaggagctgaggcttgggaactggcttagagatcatcccaaaaatgctaaccactgaagaaataaataacatttaatgatcaagaccacaaatgctgtggtctagataattttagttctcaaacctcaaacttcctggatctgaacactctgtgaacttacacgtaaattatgtttttgcagatcatgttgttatattgaaatttgtgaattaggaattaaagagtaattttaaaaacaaaattaaaaattgattacatgaagactgaatgcttacagtttaccaactgagttatgttggagataacagtgatgggtgtgggttctgcattcaaagtttacagtcttgtgggagagacaatttattgtgatatgataatgtgtattatgagtgctccagtggggaagtgcaggctgtagtaggttctcatgggataacacaaaccctaaatgtggggagggggccagagggagctttccagtggaagtgttgtctgtgatacctaaagggagtccaccaactgaagctgttcgtgggagggactgaagctggggtgttccaagcccaaagcacagcacacctacagttctagaggtaagagaggacatggccattttgaggggagctggggaagttttgtgtaatctgggatgtaaatgttagatgaggcgtggtgagaaatgagaaagaatctgttaaagactaagggaagatagaaagtattgaagggagtagtgacttaatcaacattgtgttttagttgggctatattttaggatgatgactctggaaatagtgagaaaataaataggaatgggaaggactgaaggcattaagagatcaactggaagactgttatgtaatgcctctgagaaaggaaggtgtcttggactggggtaatgacaggtaggattacaaggaggagatggattcagctttctatgggatgtagccagtaagacatataggattaaaggaatgacaggtgctgagaatgaagcccaaggttttagtttggacaagtgatagttgtgatgaaatgacggtggagcaaatgatttgtggatattgtccaaagagggtgtgaagtgatgagctacggctataaaatgggtagggaaggaaataaagacaagaagggcatcataaataagtaaaaacatcagaggggttaatagtccataagtttcctgttgtttcagaaataaaacaggtatagatatagtaaatgaagggaaaatatgggaagagaagatgcagtatgagaatgagaaatatgaatttaagatttctgagttggaatagtctcaggggaggtaaaggctcaaggtatagtcataaggaagatgggtgactgaaatagtttctcctaaactaaaagtgctataatcagaaaaggctgcataaaaattgccatatataacagctggggaagaggagatctagaggtttgttttaatcaaatatatccaacaataggtaaagctgggtttttatcaatgtttctggaatttcagatgcctcattgaaacttaaagggtcaggaggggccaagtgcagtggctcacacctgtaatcccagcacttcaggaagccaaggcatgaggattgcttgatttcaggagtttgagaaaagccagggcaatatagtgaaaccctgactccataaaacaaaacaaacacaaaaaaatcattagccaggcatggtggtgcctgcctgtagtcccagttacttgggaggctgaggtgggaagatagcttgagcctaggaggttgggactgcagtgaactgtgattgcatcactgcattccagcatgggtgacagagggagaccctgtctaaaaaagaaaaagaaaagaaagacaaatggtttaggaagaatagccagttggtctggtcatctctggttctttgctgctttggcctaaggtcagtcacctgttggggatgaatggaatagtagtttgatattctctaaggtgaggtccctgaaatgaatggaaaaaaaaaatacagattttttggaaccagtcttcattactgtaagattccaaagagtcttctccatttagtctagtagatatacaaaatgataatttaaaaaaagacatatgtcagtgtctgtgtatatatagatacatatgtatatgaaggaaagattaatatcaaattatacatgtgtgtttatttttttcttaatgcaagatatagatccatttcctctcaatagttacctttagggagttatatgaagttgagtgaaagcatatgggtgaagaggactcccacttaatattctgtattctcttttctgtgtttttttttcccatgaagtgaattattttattaaattaaaacaaaaatattttaaaaagaaaattatcacgtgatatggcaaaatatcagggtggggtaccacctctttaaagtagcattagagcttagtcacctgtagaagatacttcaggttataggtggaccaggacattcggcttccttcaggttctgtaggagatagaaccagctacatgattcagaaaatggagggcagtgcagaatgagaatgcagggtctcttgttaaaatattattatgaatttcaagagaacaacagcaaagcattaagccaggcacgggggtccttctaagtgctgggcttgccacaaccgcgtagtttcgcacccatgatgctgggcctggctgcaagcattgaaggagtgggactccatttctggtaaacataaagtaatattctatacctatttttataattgttttatcagcaaattccaagaattcaggaaagaaggagtttttctgggcttgggcaaatcagttgctattctactcacaaacatgagaatcttgtatagctatgtgaaacaatcgccatgggcaagctccggaaggcagtggttctcagctcttagctggccacagccagcagaaagcaggaagacctgcttccagttttatccaaggctcagtacagcgtgtaggggtccgtcagaatgagaggggctggtggaaatccctctctagcaagctgagaatcagtacctgatttgctccattttttttttttcaactagcctttaaggagttagtgacaaatccatgctccacagttttccaccaaaagctggattttttccaggtccctgagttctgcagcaagatacacaaaaatcaaaggaaatctcttctaaaacacacagatgctgtcttagagggtgaaaattacattaaagtgaaccatagaagagagtaggtggagaaatttgttctgctttggaacattctttaattaagtatattttccatggttcatgagaacttgtgagaactccgattagaaaatttaaggaaaaaaagattcccaccatctcaaattgtcatgaataattgattcatgccagtgtgatcataataagatcatacttcggatgctgcccatcattccctgtctttatgaaaaagatattaatatatcatttatgtgtaggcctgtctttgcaggttatcttcacgatattccttcagcattgcaaaggcgctgtcataattacaaaggagactgataatgtaggcagcagtggcaacaacaccacacccaacgaatggtgtgattattaataattaccattttcttcttattctttgtgagttgggttcttattattatgtttctcccatattcagtagatttttaatcttaccaaatggttttgtgtaaaaatatttactacagaacatggaagattaaacccatattcctacatatttaagttttcagtattttagccaatttgtgatagttgatttttagtctagctttacatcttttaaataacaagaacaagtcattcagcatttttaattcaaatacatgtaacttgttttttgatttctaaataaaaggttgtcttttaaatttattaaattcaaatattttaccccaatgaaacaaaaaaataggtatatatcataaaaatcttttttaaaaagaggattggaataatattgatttttgccataaaggctacatgtgtttggactaattcaaagtagatggaacaatttcaggctacaagaacttctgattatttcaacattaaatttgaagctagttaccaatctggtcctggatagttgatgtgaagggatgttgatattatattaattcccaggtgtcacagaaaatcaaatagcagtacctgaaattagtcaatcagtcattgtgtgaaacagtgttgagtgtgatatggctgtgactctttatgccttctgctccactttctagctatgtgatctctactacagttgtcccttcggtatccatgaaggtttggttccagggcccctgagcataccctaatattcagatgctcagatgccttatataaaatggcatggtatttgcatataacctatgcatatcttctaatatactttaaattgtctctacattacttataatacctaatacaatgtaaatgctatgtaaatagttgttatactatattgtctagggaataattaaagaaaaaaagtttgcacatggtccagaagttacaaccacctttctccccctgctggatatttttgatttgtgattgactgaatccactgatttggaacgcatagacagagggagctgattttagtgtcttatttgcccttctaggtcaggatttcccagtctcagactgatgtagagcttcttttcatttctttgaaatcacattgattctttaagtctaacagccgtacctgtttcactcattccaccctgcacaacatattgatataccttggacttttttattatggagatctgctccattctaaggttttgaaaccagaaattcacattctcatttctccctgtccttttccttaatgataattgtgcctaatctgctaattacgttcttttcccttgtaatatcttatccgcttcttgtcttcacctgactgttttcatggtcaactggaatctgcaaatgatctttcatgatctccctaaattccataatcttatggcatttctgccatgcttatgctgaaactatggtaacagaccacacatcggtcggtcttctcacttcaggttcccagcctgtggggcatagaggaagagtgttatgtaatggaaggattaattatagaataaatatgtgttctctcatctcagttgaaatgtctctgcttctcagtttttagttggtttccattttgggttcattattgccttttgattttataacacttactgttctgtaaggattcagattatattctagtcctctcattactgggtcattgtagtttatatttaagcacagctcctggtagtcaaatccagttctggtctacatgcctgataccttaagccatcttggtctatgtcctgggagaattagtaaatactactacagtagtgttttgagactgataggttgtgtttctcatttagtgcagtgggctcttctcagtccttattctatctgtaggatttgacaggacatgttttctgcttgaaactccctccctatcctaccactcccctcaccactttctgcctctatagttcatgttgactccctttcagtctctcagatgccactgggttcctttctgcctctcgtcggtcttttgcataccagatcttccttcaggcttgtcccttcagaaaggccttcccagacccccatctacaatggcttttcctatttctcacaacaccctttcctttttagctgttgccacaatttgtaatttatttgtgcaattcacatgtctaatgtctgctggctctaagttgtaccccaagcaatcagcataattccaggaccacagtaaactttcattaagcaaatttggatgattgattttaaaaattgaaataaattgatttttttctctactacttcctttcatgaactttcgccatagccaaaatatgttatttgcacctctgtccacttgtctagtattttccttttcccaggcttcactcatgttacccatctctccacgtctcccgcccaacaagcaaggctcgtgtgatttctgcctcatctgggactgggagtgtttaactgtatctctcctaaaggactcattaatttcaaaattgtaatacaggtgtttatgaccctcttctccattactggactgaaggttccttaagggtaagattggtgtctcattcagctctgtagaccccacatccctcagcccagggccatgcacatagtttcccccaaatacatttatgttaattgttgaataaatgaaagtctttaccttttgactacatttagcgtctctgtaggagactgacagctttcaattagttaagctgtggtaatttgtttaaaatgtggattgactatctttgcttctcttaaggagctaattttctcagtccgcagttcatgcatattaaaagatgtttttattagtaatattaacaatgttattaccatagctttttacagttaatgaagtttttcatatattgctctaacctgggctatcagcagctcaagcatatgggatgagtatcactattatttatctataagactgagctcagaaaagtcaagcaactgacctggggccatgcagctaatatcttgatttttcagcatacacccttaaccctagagtgattctcaaatggagagtggggtagagataagggtagggaagggactttgtgatgtatgtggtcctctagagagtgttagaatcataggagaggagacagttgttccaagttataaccttattccaagctcccaattctagtccactttcctagttgaaaattactgctcttttaccactagtattaataagactgcattctgcccttgtgttggcaagagaaaagttggaaaaattgcagtatactatactccttcagaacttcatctttgttgtgctaaattcaaaacagttcttgggcttaatacataaatattatatatatatacacacacacatatatatatatacacacacacatatatatacacacatatatatatatatttgacatcttagaaaaaaggcatttttattctttaataccatttacttattgcctcctggagaacttggtctcattccaatggataggtagagaatcagcatatgccatttttaatgtgcggtaaatatgcattttccttctgcagcaagacaaaatcttgataactgaaaccaatgatatgaggtggggaaggcattatgattctatagtcatatccttttgtgtgaaataatggttctcatctctttatcttggcttaaaatatgtactgatgtgcagaacccaccccagaccaatgaatttagaatcattaggggtagggcttgggcatttgtgagcccccatgtaatcctgaagtgcagcacagattgagtattaaggtttttgattgaaaatattgccctgaaacaaagttagtaaaataaggtgaatattagtcacttatctgaatacttaaagaccttgtttcagaaagtggtttcttacagttatgactgatggcccacaggaactgataggtatggctctctgtttgggatagggtgtgttttggctccttggcttaacccttagctctttttggaagttggtttttcaagagatgtcatcattgttcagaatgtgtttcttacttgtagttttactctgtaacacttttacctaagctttataatattacaaaagaatgattataatttgcacaggtagtctggctaaatggtacagtgaaagcacttcaaaatctttcaggtgtaatcataagaaattatttatcttaggattcttgatatattacatcgaaatcaaggtttatgttatatttgagtaaagttttcaaggatgaaaacgattttgcctatttttttctgaagaattacaaacacctgcttctttcatcttcctttgacactctgttcctgaattggagtaagctgtgttttttagttaaaaatttctggaataagcagtcttccaatcaagtgtttgtagatgtattggaaataatgtctccttaactattatagctagagtttgttcttggcataaagcaaagtctcttataatagcgatacagtttacctaagagtcatattaataagtaaaaaaaagatcagctttttgaataatatataaattcatatggtatcagtggtatctaggcatttgggacaatacataattagtttcagttccctttgagagggagatgtggatgttaaaataaattgctgatgaagcatatactttggagaacagtgtatttcaaaactgtgcaatatcagctttttctttcaatggtatggaaatatagcataagactaagaagatttattaggggcagctttaagccattcttactgtataaaagttcatagtttgctcatttaggagtagttaccaaaacaaagataatagcaaatatttataggcctgctaggaaaacattgcatctatacaacttttggcaccattatggtcaataagccaataataattatttgcttgtgtaagaataatctgtatcacaatatttaagcatttaatagggtttggtcatttaattattaaaagttactcttttattaaaaaatgagtcatggacttactccagaaaaactagcactcacaaagtaggaaaacttatcattgtgaaataaatatgtgctgagaaagagtagaaggagcatagcttgtaataagttgattttattaagtaaaagtgaagaaactgcctctgtggaaggaactatttagctaccaggaataaatatcataaactaaactgttcttgcagagcttaattctaatcactctcacattgagggagttccttcaatggctttagtgtttctgtggaaactaattaggataccacatacacagtccatgtagtataagaccatatgtaagcacagtttaccatatactctggattttttggagacacacaaacaaaatacgctctcttcttattttttgcataattttgtgaagtctttactctgaaattgatgaaggttatcaccgttaccttaaatatgtttgaaactattttcccggctgggcaaggtggctcacgcctgtaatcccagcactttgggaggcagaggcaggcggatcacctgaggtcaggagttcgagaccagcctggccaatgttgtgaaaccccatctctactaataatacaaaaattagccgggcgtggtggtgcatgcctgtaatcccagctacttgggaggctgaagcaggaaaattgcttgaacccaggaggcagaggttgcagtgagctgagattgcaccattgcactctagcctgggtgacaagtgtgaaactccatctcaagaaaacaacaacaacaacaaaataacaaacaaacaaacaaacaaatgattttccctaaaatatgcagcccattacttagctaaggattcgccactcctcatttattatcttcctccggtttgcttattttgataaacattgggttcacaatcagttccttgtcctcattaagcctagaggaaatgaggggtttgttgtaacactcactgggaagaagtcttcaattttgtttgtttgtgttatgacatctacagtgttaaagtaaaaatatttaaatgatacagttcacagagtacatacttaatgtgccaaaagcacaaatgtgtgggagtgttcattttctgaatttttctttttactaaaaatgaacaaacataagaccaactattacttcttgagcctaaaaaacaaaattagataactaagctctcagagtcagaatctacagctctggtatgactgagtaggtgtgatcatagcctggtcagtaataatgacagattttagtgtccattttagtgtatgaaacactaaattacagtaaattgaaaaatgggtggtttatagtcctagaatagtatttctcagagagcaaataagacattaaatcatttggggatggttttattcttcctcttaattgaaggtgtagtgtcattttcacatctttgttcattaatacaaatatgaaaatatttgtgaaagtcctcttggaagacaggctcattatcatgtgcatctccagtttggacatatctgcatgatattgttttggcatacaacattaaaacttagtcttttggaaaatgccataaagaagtttcattattcagataacttaatttcaacttagagagtttccagttagtcaggcctattgcagtccactctagtgtgccttgggaaataactgctgaaatttcacacacataatgattatgtaggaagactttggaataagtggaggcgtcagtgactatagatacaaacatagaatggtgctttaaaaaaaataatggaagatacacctgtggtaagccaattatcttgactcccacattctaaatagactaataataataataataataataataataatgggactggaggaaaagtgaaaataaaagaatggctaaaagtgtacctttctcgtcagccacttcctatttaataggagtgaggtgcttagttagacattgtaaaggtgcaggcagcacataacaccagtgtatagtgaaagactatatgcacctagagaaggtgaggtgtggagctctgtgattcggatactaatcctcactaaaactcattcactgtgggacactgggtgagtcactttgtcttttagcttaaacttttgcatctttgaaatgtacttggagaaaatcccttttctcactacctcacggggttggtgaagggtcaaatatgaaaatcgaaatggaaatattttgttaagtctcaaagtctctagatggatatgagtcacacagagtgatgagaataaccagcacttggttaaaggaagaagtacagggccattgtgagttatgccatggaaagcatagaacctcttccttactgcgttttcaggctgatccagagatgctaagcagagaaccagggagaaaagtagagcttgacccctggatcctctcactgattatccaagagtaagtgggaaagagtccagtaggtgtaccatggcctttttttaatatagtcttaaaaaaccccgcaaacacatatcaaaagggatttctacatatgaggaaatgagccactgcactgaatagaccccttttatttcaaaattaattttcacttttaaatataatgaaagatctcaatcagaaaaatatgcacaagaatattataagtaccaatgtcccagacactcagatttaataagtgttaacatttttccaaattttctggagtttttgtttgcctcttaggaaataaaacatattttgttcaacatgcagattcaatatgtatattctatgatttttgaaatcccacttaaatgatagtaaattaataatacattttaaaaaggtacacatttaaagagaggcacagacaaggaaacaatagtggatcaaatatgtgaagacatttcttcaagacggcaagtagatggagaaataataactaattttatggttctgaaaatctggaacctaaatgtcagtatgacacaaaacacagtactaccccaaaaggctcaagatttggaggacccaaggctcttggaagatgggatgaaatttagacctgagaagaagagtgtgcaagatttagaatatcaggtttcctccgcaccacccctgcctgctctgggcactaggcatagcagagcaagcatgggagtgtcatactaaacaccgggtgctcagtgaaattgactgcctaaaggatgagacacaatcctttccccccacaacacatgaacactcctaacctctttctctcttgatcaatgatggccatgaaccagagattacgaattagagaacatgttagttttcatattctcttttattccctagttctttaactcaaagcaaagaaaggaagagatttaatcttacctcctcctggttgccattgtcactagtagcagccctgagctcctgacaccaggctgaaagcagaggggattatgacactagtatagttaataattgttggcagtaggtagacagaaaagtgctcaatcacttttctcatatactttactcatatactccttatatgagtccattcttacactgctataagaaaatacctgaacctgggtaatttataaagaaaagaggtatagttttctcatgcatatgcatgctgtacagaaagcactgctggggaggcctcagaaaactcacaatcatggtggaaggtgaaggggaaacaggcacataattacatggccagagcatgaggaagagagcaaaggaggaggtgctacacacttttaaacaagaagatctcatgagaactcactatcatgagaatagcaagggggaaatttgcccccatgatcctatcacctcccattagacccgctcctacaacactggagattacaatttaacatgagatttgggcagggacacaaatccaaaccatgtcactcctgcaggttaatttcactctaactgaatgtttctattgaagatatcataccttccaccctctcttacttgtttctctagaaaaagaagaaaattttaataatgatgttgataaatattatttagatgacttagattctgaattgcaaggcataatgaagtgggttcttacatagattctttccagatttttttctagatatcatgtcatatacacattgtttttctacatgttgacaataaatcagggatctatactcttgtaatttaaagatagcgaaggtgatcagagatcagtgtgttcaacctctgtgtttctcaatggacaaattgaagcagagaagtaagtagtttgcccaagaatactcagatagtggcagaaccggagctgcaacttttgaaaatgatctttgataatcaatgagaatatgtagtaaccacttgcaatttgtaaaccatgatatgggatttgaaaggctatattaatagaaaataattacttgaaattaatgggagtttttaagttcccagatatatagacatttaattcactgtcaagttgcccattttgttctcccataagggtttgcctttatgataaaaactgcccttggtcatcattctaaccgtccatgtttccagtattagaattatgattctccagtgaagtgcataaggcaggagacataagaatctctggaggaggagtctgttttttttgaaccacacaggatattactagaggatgtgcagtgctcagataaactctgtggagttggaaaaaggttgagaactactgctagagaattatgtgttttaaccgagtaaaggaaccagatttacgaaattagacaaaaatatgaagttagatacaaatcagagtgatagtgtcatttctaaaatctgagcagattcataagaatggcaacatgattccctcacaactgttcatttcattattaaagagcatcaaatcattcatactattctttctagcctaagaacaattttcactcaatttcaatataaataagtttgtatatttcagagaaatgaatgtatgtgtttctttcttggaaagtaattaaagtataaaatttctgaaagtgttttctaatattccaaattgtggttgtattttacatttatatacagttgatggcccctttatgtaacttcaaagaaccttttattgggagtgcctcagtttgcagtaaatatttaagccaatttctggtcagttatactgagagtggtcttataaatgaataatttataatggtaatggcgtatatggtaaataagcacaatatttggaagactattgctgggaatggtttatggaagtacattctgtgatttttctaatatatttgttaatgtttataatttgaattaggtaataaatatacatccagaggacagtgtgtgtattatctagccacactggctttccatcaggtcagcaaatgtgctgagccttgttcggcttcagggctttgcaggtgttgttagtctggtctgagactctgttgctccttgtctttgtgagggcccttccccttcagatctttgttgaaatgccattccttgctatccaaactaaaaaatttcccttgatattctctctgccagtagtacttttatactagttgccataatttaaaattgtgcatctattatttgtttgtttttgaggcaagatgtgtcagcctgtcacccaggctggagtgcagtggcacaatcatagctcactgcagcctcaacctcctgggttccagccatctaccagcctcagctggtactcctaagtagctaagagtacaggcacgtgccaccatgcctggataattttattgtttttgtagagatgggatcttgttatgttgcccaagctggtcttgaattcatggcctcaactgatcctcccgccttggccttccaaagtgctgggattacaggtgtgagccactgtgctgggctttgtttacttagatgtttagtgtatttttgtttacctttatttaactcatcttagcactgtgtctggtactttctagataaatgtccggtaaaagaatgcataatataaataaaacataattttatatataatgggtatttcaacttcctgtttttcttcaagtgctgaaatctttttattgttctatttttttattagctccatgtattattcatggtttttgtctactgttggaatacagaattatatttttctaactattgatgaaattaatgtgaggtctatggtgatgaatacatttgacattgtcatttttccaactaatttgaattagaaataataattgaccttatgaattatgtgcatgggatggtttataggggtttgaaagaggcagacacttgctacaggttttaaaaatcatcagggttaagtataagaagcattatatctgggaagtacagggaaaggcaattgcattatttttcttaatttgcttttctaggtaagcaatatgtacttattaagattttatttaaacaattgaaatggggagctgcagaagaacattattgtttctttctattcttccttgatgccctcccctcccctccccttcccttcccttccctttccttcccttcacttcccttcccttcccttcccttcccttcgcttccctccccttccgacagaacatcactctgttgcccaggctggagtgccatggcacgatcttggctcactgcaacctccgcctcctgagttcaagcgattctcgtgcctcagcctcctgagtagttgggattacaggcacccgccaccacacccagctagtttttgtatttttagtagaaacagggttttcctgtattggccaggctggtctcgaactcgtgacctcatgatcagcctgcctcggcctcccaaagtgctgggattacaggcgttagccaccatgccgggccccttgacgtcatttttctatgtggtcactgttctcagtgctggatcagaagaatagcactgtatgtatgtgggcttccatgtgtcatttaataaatgttgagtgactatatgaatgaaggagtggaatgtttcttgttatggaaaagcatacagtttggtggagaggacggatctttaaacaaattttgctctagaggcagaggagggagccacaaggttcccagcggaacaatttagcaaaggcagatagtagatgacatttcacctaggtgttgatgtaagagtaagaggcagtgaagggcattccaaggagaggagtagtaggtacaaggcctagaggcatgaaaagattgtggtaagtttgggaatcaggagaaattcagtgtagctagagtgtgggaaaataagagaaaacaatggcataggggtttggagcaatactgtgaagggtttggaagaggctactgagttgtgattttatcctggagatgggtaaatactggagctttcatctaggacattaatgtaaacacattttgtttttggttttattttttagaaatgtatttttggtagtgaaatggaagatgggccggaagagaaaatctggactcccagagttcaggttaggagaccaagataacctagataagagatgatgaggacttaaactgatgttgaccaggtagacggaggggaaaggatggattatggaacacagttgacatttgagagatacttgtgtgcaaggcacacagcaaaggttactgattcagttagtgacaggtggtgggggatgagcagggacgggccagttttgtaatctgggagagttttcaagatgtattccctctctgacatctattaactagcacagagtcttcaggatattattaggtgctcaataaaagtttattgtatgagaataagcaatattttctttatctctcatttggttgtatctttccctactttgttatttcattttttcttacattttatccttgtattctgacactatttcttagttttgcttctgttttccccagaagagtactttggttaaaatgtatcacttgcaaaatagaataacacaccgccatgtagtgttgcttcaggttataattttccatatatgtacagtatgccaaaaggatgctgcttctagagagaatgtttaaaactcacttctctagatttttttaaagttactttagtgtttcacatgtttgccagatatcattgtcattgaagataagcattgattaaatttcagaattttattaatgaaagcaatcttttgagcaaatttagaaaataaatttagttttggtagggtatattatttattttttgtagcaaaattatttcttcataatgtcaaagataatagtcagtgttttacattatcaaagtaaattcccaaaggtaaagaatgatttgtgagtgccactgggcttggctgtgctgaaattgtgagcctgttgttacttctgatttatgactgggaaagtctgtgttcattgtgctcactctgatgtcctagtcaggaaaccaaaaaaaaaaaaaaaaggaaaaaacaccaccaaactgggagatgtcattttatatggttattttttctatcttcaagacaaaatcaccaagataacatttttgaagcaccaacctgcacttcgggctgatgagtactagtggaaggcgtcatcttggaattttacaacccacagtcacatgactacagctcccaccaacaatatatcaaaaagaacaggttgtttgtgtcactaaacactataataaaagaacaaaataatatttacagaataacagtttatactagagcaatagtttaaaatctggttgtatatcagaattacctgaaagcttttttcaaatattgtttctgggttccactctctggaagattttgatgccacagggcagggttaggcccgtagagcatatgtagaagttgtatctgggaagcatggttagtagcaataggacaatatggaggacagactattctaggagattgttaatggacagagtttagcttcttagtgatgttaagggatgaaggtgctaatattcagtcattcaaaaaggcgtattggatttttttttaaaaaaatatatctacttagagcaaatatgtaaaaagttcaaattttaaaaattctggtaaatttctgggtgttatatattattcccaatacttttctttgtttaaatttttaaaaaagtgttgatgcagttgaaattgcttgttgctctctgaacatttgcatctttcttaagagattacagattttgttcagatgcacaaaagtcaggtgaaaagattctgattagtttcagccagtcatggtcatcctgttccccttgcaagtgattggtttggaggtcagcctgtgactcagttctggccaatgagatgtgagaggacatctcctggagggtttctggaaaagtgtttttaaatatttttagaaaaagacattaagggagaatgccccctcttttcaaggcttgatgtcattctttgatgaaatgcctgaagctgcatcatagactcataattatgagggcaatagtcagatgagaaagttgacatgctgaagatgactgtaaacatatggaatctttgtctttcatgatataaagctgtgaaatcaataatagtagagctgcgctatttttggattttctgttatatgagatgataaatatttgtaagttaagttatatgagggccaggtctttatacatttattctttgtaatatcccttattccaagaatggtgcctggcaccatagtatataaaaaaaaatttataataatgtatttaagtcggtttgcagccaatgttaccttgagagatttagtgggttttaatggcacaattagaggaaaaacatctgtgtaaatggtctcaatcatgttaatcttttatttctttttttctttcttttctttttttttttttttttaattttgatggagtctctctttgttggccaggctggagtggtataatctcagcttactgtagcctagacctcccagtctcaagtgattctaacagcttagcctctcaagtagctgataccacaggcacatgccaccacacccagtttttttaaaagacagggtctcactatgttgcccaggctggtgaaaaacttgtgggctcaagggatcctcctgcctcagcctcccaatgtgctgggattacaggcatgagccactgtgcccagcctcaatcgtgttaatcttgaaatgtggttaatgagtttgtctctctgtgccatttgcagatgcttatatgttaagtaacattttattcccaaggagtttaaaattatcttgctactttgatgaagacaaaatctaaaattaataccccccaaatcatgctccaaaaaattaaaacatgggcaagattttaatctcaggagaaagcaaatgagaatgagaaaataatgtcatttttacttattcatttatgtgctagaaatttccattgtgtttaagctgtctatcacatataaagaagaattaaaaattagtatatgtgaatctacttctgcaagtttggaaacttttgttgcacgatttatctgaatattgttgttcgattatgtgggataagcagcttgttcattacttccttatggaagaaactcaccaggattttctatatgggttggacaagataattagcaccatcccagttttttcctaagttaattcttagaactttgcttgcagtcctaaattatcaaattatgtcagacagaggttcatctataatgagaactgttattagaattaaagcacaaagatttccttttctcaatgtattttaagggaatttatggaagtcctcctagtaacaactactcaccaaagaactttgagggctatgagcactactattaaagttttggaaatgtataataatagaattgattttcttctgatttaccttgtgtaaactaccagaaataaatttaattttgtaaatgttcagttagcaatttgtatgctcgtctacgtaattccatatctcataactggaacttcatttgcattcccactgccctaatctcaaggagataccagtttcacttgtatattaagttgggtttgcttttattacaaggaggaaaaaactttcagttacgaaatttgactttgacttttctgacgctgttttcaaaaaggttacttaactagtattttagatgcatttctctacacatagtatgatatctgtaactgaatctttaattccctagttacaacagagtgaatttcttgaatccttgctacacttccgccatcctcatattatgcttttacagcaattccctagactcgtgaaggtgaaggatgaagtttataatggtattgaataccaaactgttgcttgatttattcaggaaggttgttatatgctgggatcaagtgacagcttaaaagctagtataattcatcatcatcagttaattttcacttggtgtccactgggtgctgaacatcatacaaggctctttgtcagcatatatgtgtctgatacggttgacggaattctaagaatataggatcttgtactgaaggaactctatataataatcaaggcaagtcagcaaatgcccagtattgtcaaactctgtgtataaaatgtattctattaaaaatactttatttttgtgaagggttcatgtcagtaaattgaggtcccagacgcagtatctatactgctaccagaagaaaggggtgaattggatagaccaagagcagttatctactatggtcttgtttttggctgatcagcacacacttatgtgtgtataaacatgcagatgatgtcacaatgtttctacttaatgagatccaatgatccctcacacaaacgtatatgtacttctctccctaatgagaaacaaatcaaagtaacatccagatgaagcatctagagctagtgtcatgttattccacagacctctaggtgatgtttgttcctcttctgaagtaattcagaaatctgtcctaaatcaaatttggaagtagcccttcatgatcctgcaacatgtggcttaaaacacctctggataggcagaacgtaggatagccacagtgtaaactctgaagtacagtgctggtctagggaatgcaccatttttccctggttagggctggtacagaagataatatggccagggactatcataagcatcttgttgttgagtttcttccctgaccttggtctgggttctgtcccagtggatttgttactgaaggattatctgttaagaagattccccttgtttggggaccttcatagccatctctgagaaggggttcagggaggattcccttgcaggggccttagcagttctttctttgttggcaacaaggacttggattcagattcccttagggtggaacagtcataagcatttatttgctaggctggggatgtttctagcaatacagtttctttattatttttgttgattgcttatctatcttatttttttgtaggtggcagtagaggatttcattttctggtcactggctccaaatttgtgtcaaataatgatctttgactctggtcccttgctttaccactttcgtttttgggctctgggctatccatatcgccttttgtatcaatttaatagcttcctgtcactagctgtacttctgcaagtggtgaggcttgacctgggttgctgcgccttccccaggatttactccttgtgaatgaatgatctgaatgacttaaaggcagtgagtggggaaggcacttggatgagcctggagtttcagtcttcaatagttcaatctcctccctaatatttccagcactttagtcagcatactaaactcaaacaagtaacttggctgctgaaattcagctaacatgtatatgattatcatgactttagtggtctcagatccctggctaccaaggctgttccttagtttgtacatgtgtgaattgcataaaggcaagtgggggctgaacttcagttcttcctctactcaccagcgcttgaaccacagcaagcatgactttttgaaatgtgtctctacagaggagaggacctttttgagtttacacaataagaaatttatttgcacattgctggctatggctgtatcacctgtaggtaaaaaaacagcttttaataaagctgtctactttttctagttggcttttacttcaactagttagaatgaagtgtattgttttgttgtaggaacttctgaaggccataaaaagtctaacatacaaatatatggacagttttctgcagagtaccatgaagatccagtcttagtatacacatttcaagaactgatgagctgctctttaatattaactgctgatttttcaggttaggatggagtgatctcattgttcccattcttgcctttacttacctaacttcacatttcaacaatctacttctgatacaggtgtttatattaggtcggaattcttggtttcaaacttttttatatatatccttgttttatcagagagcctgaatcacacagaggggagtaaagggatccaaaagcagggctgggtctgggacctctatcagaaaagcgttctgcatctatctaagtttgtcaatatattcattgaattgaaacctgagagtgctgtatgcttcttaatgggaggtcttcttgcatactttgtgacctgtattgcttgcttttgtgcttttatcctcaaatgaatgacaaatttggctttacatcaggctagcttttgtacatcataatttcttgttaatttctctggataataagcattagagaaaagctatacttggataaaatatagtggatttttttttcttcattggtttactatctggggatgttttagtaatacatgcagatcttaaaagaaaatgctgattattttctttaaaactcttatatttggatttacttttctatcacatcatagtttttctgaaaagtgaaagaaaatgtttgtatattaacttgaaaatgtttatttgcaaaaaggctttgggctgatttacagaaaaaaaaagttaataacacagaataaaaaaacaaaagacaaatagtaattcaggaataaatggggaaaaattatgtagaggaggataaggaaatggaaaaacaagggttagaggctgggaagctaggcctccccgtacataggaggatctgtcatttctctcatttgcatatgaagtcctaatgtgggggagggagggaatgtttagggtaaggggtgaagtaacttttgtaagaccacagaaatgggaaatactgactctagcattcaaaccccggtttgtcttgttcaaaatctacaggcttaccactatttatttttgccaatatcttgtttgaggaaagctgttagcagttacacatacattactcctgatacaaaggtgatcaactcatcccagattgccggggaccgacctggtttaaaactaaaaattcttcatcccaggaagccccaccccactctaccacccccttagacctgagtaaactgggattgttgggtcacccatctgatatcctcctagtcatgattaggatggaaatttgaggaaattttacataatggtcttcaaatggcaaagtaaggtgggatggatactttttctgcaaaactacatgatatcattattatacctcattaataattagaccctgcattgtaaagattgtcaactttctttttctctcttttttttctttctttcttgagacaggatctccgtctgtcactcaggctggagtgcagtggcctgatcatggttcactataaccttgccctcctgggctcaagccatcctcccactgtagcctcccgtgtacaggcatgtgccatcacacctggttaattttttattttttgtagaaacagagtttcactatgttgctctggctggtctcaaactcctgggctcaagtgatcctccgacctcagcctctcaaagtgctaggctctgcacctggctcagattgtctactttctaaggtccactgtagctgtggatttagtagcattctttctactactattaagagattgtttatatgttattaatagattgtttatatttttagccgatcatcatttaaacatttccttcttgtgaaatttggcatattttaagtcatttgggctaaaggcagtttatgtatcgtgtgtgtgtgtatatatatatatatatatatgaatatatgtgtatatatgtgtatattcacagtacatagttgttaataggccttgatagaagctattaatgttttatagagtctcagcattaattctatagtttaaataggataaaagttaattccctatggaacagtaggaaatgagcattccaggtcagtgagaggctcccctccctgctgccatacagattccttttgtttggtctctggaacatctcttaagatatttcactcagctgtggtcaaaactggtttgctgccaactgcaaaaaacaaagtatagagagggcacacccgggttttaaggcccaatcctaaaagtggcagaaataattcctgctctcattcctttagagagaacgtagatacatacctgaacctaactgcaagggaaagctgagaaatgggactagccacgtactcaggacaattgggaaaattaatttggagaagaatctcttactccaggcattatttaaatctaagtactctctaaatgttcttaatgaaatgcagaaaaattattgcctctctaaacacaacttctaaagttttatcctttctttggggatgggggtagttgtacttcctgttgtcatctggagatttattttgcaatcattaaaaccgaactaatgttaaaaattctgtaagatgtgatataatcataaaacaattgcctcctttgcgagttcccagccaggtagttacagaatttgactgggatccttaaattgatcaatgttccaaaaaatgtcagaattccaaaatgtatttcagtatgttaaatatatacatcaaataaaataaagatggaaaatatgatgtcataaaagagtccagaagctcaagaggcaaataaaaaaaagattagaaggcccttgccagggaactaaagaaacagatacagaaagtgccagaagcttctagactatgtcagtattgggatatagggtccatgtagggtctccatattgaggaagatttggatcaagttgatgaaaagagttgggtattaggatgtttattttagttgattttagcctaaattcacattatatagcaataaaaatgtaagatagtttttatcatgttagttcatattgaaataacttttcatcttccttttaaagctgttgtatatatgcaaataattgcatatatatgcatattatatatatatatatcttctactatctgtgtgtatatttgtcccattgtgaccatggagtagcaaagtcctgggcaccagtaaaagctttgttgccatccctgggaaaagtcatttagatttacaccaagtcattttccccctccatattctacattgatcattttgttactgacaattttacatcctgagcatttaattttgatttttttatgtgtacaacaaccatttaaactgaatagcatgagaattcttttgtaattttattaaatctgacttgtgtaaagtgaccagtggctgaagatgatttgcacatgctaatagattatacactatagcaaaatgttgctttatattgctactccagcagctgtggtttcaagtatagttattactagctacaatatcaccagttttttaaaaaaattgtcaaaagaagttcatgctattgactcatttactcccatatttattattcttattgaaaatcgctagacctaattctattggtttccttcctgattgaaaacatttgaacctagaaagtgcagtatttcttaagtcatttgtaactattcatcatggatattaaaattacaatcatgctgtattgtgtcagcaatgttttttttttttaatctttacacatatgctaagccggtgaccaatgctatccaggtttgaagatgctgaatgttcttataagtggtatttgaaattttgatgtgtattgcattcattactgaatatcaagaatactttttttttgctagtattatggagtaaatttaaaatggggtcttttgtagaagcacctatcctgtttagaatgatataacagatgctgaatgttcacatatcaaacaaaatgccagctttctttagaaaagaggtgtcaaaaagtttctttgtacctttaacgcatgtgattatgtagtacaaaatgcagagtttgtaaaatttcgtgaacatacaggcaaaaaaatgaataattcaaaacaactcataagttctacattctattgtccctttataacgcaggcagaagatagcagtgcactcccaatagagctgaatttgcacaagttacacctctgaaaaatgccagatggtctatggtctacttttgagagctgtcacatatgtaaagatttgaaaaaagaaagacagctgaatgagagcagtggatcattaaagggagagtgagggtccctaggcatcacttgtgttttaagaagcattgtgtcgtttccatattagcatgctttttttttttttaaagccatacacaactttgacacaataaggaaggaaatctgtttaaagccaagttgttgtggtttaatccgtcaggtgtttttgttcttcatttgaaaataaaatcatgtttcctacttggttttaactctaattttaccataagattcaagtcatacccataaataattaacaataaagttaaatttaatttctgttgagatagctaatgtatttaaggcttatccagttttgatttgacttacgtaatacacacatctggcaaaatcattcaactaataaatattttaatgttaaaaaaactagagtaaagggataatacttggttatctgatcataatccaaactatagtgaaaataattaggtgacagtgaaacaaaaataatgtactattatttatctgccaacagaaatggatatcattttaaagattgaaatgtagataaaccattaaggatgcgtgagaatatcactccagccatacctagtaatttgcaaatagtcaattttgatagcagaaaaaggtcaaatatgtcagttttagaatttggtagccaggatacaagtgtcttttaccactcttatttttatttactaaaaatatttattacatagtaattctaaatttattttgaattatgaaatatgacaagacatttttgattgacaaggagtctccccagctttggtcaatgacatttcaactcaatcaagctctcagattgcttgaattattctttccagaggaaaaagtggctttccagaggaaaaaccaaattaggtttaactgtcttttttggcatctttttaaatatgtatgcataactagctttatgttcaatagcggtcattagaatgtcattctagttgatacaagaagttacagaagcagcaaattcatctctaaatcaaaccattgcacacccgtagaaatagatctccttttacagaggctttgtagattttagttatgaaaagggcatatataactgctaaacagatgtttacttttagactattattcctctttatcactaaagaactgaaaaacggtaacaggatgttctatattagtttttataaatcagatattaatgctaatagacttggtgtgaaagtgtacatttaagtaaaaaatccatcatttttcttaaaatatgctaataaatgagtagaatattttgatatgttaagatgtttttcttcacaatacataggatgtatgaacaagaactgaagtaaacaatggcttactaaagacttactcagatgcaaactgtcttttttttttctgaaaaatgcttcaagtcttacgtagtcaccaaagataataagtcctctttagcacatttatcaaccccacgtataactgttacaaccttaaatgtaatacttttccaagtggaagagttcttcatagtcttatgtaatttacatttcataattgcttataatcgcgaacagaaaaaaagactaattaaaacagtaagttttagattttgaaattccaggaaagtatagcacagtaaaattttcacaatgaatgttttttgttgttgctggtgattttgctgaaaagctgtgatatatagctttgcttaaaatgtatataatgaagataatgatgattttaatacttaatcgatgtaaacagataacttttggggggcatcaaggcttttagctgcaaatatcttggctaatttaaatagaaaataaatttattagcagcacatagatgctcccagagttatacagacaaggatcatgtccatccattcagtagggctgttctgttgaaaaccccactgctgtagcactgggccactgttttgctaggaggtgagggacaccataagttgtccctcactgctaaaatcaacaaatacctcttcactccctgtgttgagaggctccaccaccctggtgtggctaacagcttgcattgatcacttccaaatgcaagccatacttctcttctggcagaacttaggtcacatccttgtcctctagctccagagtagcctagggatgtcgtagaggaatttacctaactccatgagtgtgaccagaatgctggacaacacaacacaacaggtgaatattcacatttgttttatgattcattgtctaaaaaatcatatttgtttgtgcttatgctattaaaacagtctcctctatttacactttaaataaaaagttttgttttttatatataggcatttaatacatttggaatttacatgtactaattatattaagtatactatacccaaatattaattgtataaatattaacatttatataattaattatattttatttatatattttatatatcacataaatattatatatgtattatataataattacataatcaacataattatattagattatattgatataaccattaatatttatattaatattattatattaattggtataataaaataattatgcatattatttatattgtacccaaatatgtaggtgtgtgcatgtctaccttatattaatatatgagtcccatatttggggctcaataatttcataagcttcattggcttgtatgtctatgcctggtccaatgctgtactgctttaggtgctgtgatagaaatatctcatacatcaaatcctacaaccctctttttcttctaaaaatttccttggtctttcttgattactcttccatatacatttttggatcagcttgtcaagttccataaacaagcctgttggaaatgttatggaaatggcattaaataataaatcggagagaattaacataattaacatatttatactctctccacttatttgggttttttctatgactttcagtagtgttttgtaatttttgccataaaacctctgcccatttttttctagtttaattccaaaatacgtatagcatcttttgtttgtttgttggcttgttctttctttttttgctattgtgaagagttatttttcttgtttatttgttaatcggttatactctttgcttacaggagcattgttgattttatatggttgtgtatcaatcttgctacatttttagactttcagtttttatagtcttaaacttagattatatatatactatatatttgaatgttccccagaacatccaaatctgtgcacatctcaaaaattttgttcattcctgtctagaagtcagacctattaaatttctttgtcttgtttattgcttgtactatgatctcctgcacaatattgcataagtcacgtaagggtgggcatttgacatacttctaaagtcctgacatttaattttggtagatatgttttattaaagaaattatcttgtattcctaatttttcataacttgtttatttaaaaatcaaattaaagaataaatatagaaaagattttcttctgcaggattcacaatgggattttttttaaaaacactgtatttttctttgtattgtctggctttgaataccagaacttatcatttctttccttttatttgaaaagacaattgagtagtttgttattagtagtagtattgagataacactgttgtgtctatgcacaaagagggctcagcatatagaaaataatcaacattctctgaatgagtcttaaattaccttttcagatttctaacttaaattttctttaaaaccgcccaaaacagtatttctatggtctactttttatatccttgtacaaacccacttttgatgaccccgttcccattttccattttagtaaattatactttctctatgtctatgttagtatttttctttcttttctttgttgcctcttcagtgttagtattatgggtaaaaccccaaatctctgttactgaatgtattttcattattttaaaatattaatttctttttctttaactggctgactttttcctgtttttaatttagcccaacctcagcgcttgcctcagcttcagacttcagcccaggtgccaagtggtgaggaaataggcaagataaagaacggccacacaggtctgagcaatggaaatggaattcaccacggggccaaacacggatccgcagataatcgcaaactttcagcacctgtttctcaaaaaatgcatagaaaaattcagtccagcttgtctgtaaacagcgatatcagtaagaagagcaaagtaaatgctgtcttttcccaaaagacaggctcttcacctgaaggtaagtttgagatatatgtagattttatttgaccagatgtaaaataatatttcctggtaattatttgatcaagcatatataattgaagaatcttgcttatccttcagacaaacaggaattttggtaaaatgcagattaactttcccaaaggaaagcacaagatagaaaaggaagcagtggcagctgacatcctgcttttagataatcgtcttctagagtgaatagtcattactttaaatataactgctatacttctttttttaatgccacatttaaaaatataaatacaacattttgatggcatacatgagtgtgtgtgtgtatttttatccctccctgatgcaatatgttattctatagttcagagataagattacctgcttgtatttttgtcttgcaaatcggttcttaaatagacaaagctaaaatgagagaaagattaggtaattttcatgctcttgccagggaataggccaggtgatttctgttgcttgactgaccagcatcttccagccgccacgttggccagcacctgcaaccatctccactcccatcccatttcagcctcactgtggtctggtcttcacctcctcctttagagacacttggctgtgttctctgtcccctggagaactagttattacctcttcagttctatctcatcctgcccttggctgggttaaaagcaggttaaatactatgaacctgagaaagttctttattaatcaaattgcacatggtgacaattaaaacagactccctttacatgattcattgtattatatttcaaaaataaaaatctcccatatttaaggatccaaatttctttccatgtatccatggttctctggttttcctcctttccccttttagcagttattggatgtctaaagtcttgaatctgttatatgtatctgatatacatatatttctccttattcccctttcctttctattttgctatgaaatcttaagtaagagaaattttgtggaatgcctctgtgaagttggtcatgcttattcatagagacaaattgagttgtaaataggaaattgtattgagaattaccagtaatgagtgggagaaaggatattgcattttggctacaggtgtctcaaactcaactgagataaagtgttaggttgatcaaatgatatgataataaatggtctgcatagttccaggtcagtgacactactttccaaactaattagattgaaagggacttgattgacactttaaaatgagtttgacatgtaagctgcatggtcatctctgaagcataggtaggctgttaactaaactggctctccaaggagttgggaaagcaatgcaattttctttagaggatcttcgcttctaggtgatcgggtgaaataattgaatgcaattgaaatgtacttgttttatacatttgaattcacttattacgtccctaacctcttattttccatttgatatttacttatttttgtattaaagaatggtaacattcgcatatcagtcctaacttgaaatagcttatggaatgtttataaatttttttattattgcttgcctttaataccatgtctgaatttatttgtaatgtaggaatgcagcttcataagtaacatacgaaggaggaagaaaatcaccggtatatgaatgagatacagttttactcttcctctttctctcccttctcctttattctcccccttccctccctcttttactttttctttctcttctctcatgctcacattcacacttatggcctaccacagagctctggataagggaagtcccttgtaatctgtgtaatctgcttttatcacaaaatatgttccagattgggttggagacatgaggagcataaaatacaaatttaaatgtataaacacattttgcaaagtcttatccatatcttcattgtaagactatagaatttagacaattgtaggtttgttttattgtgattgcttgaatctagattaaaatttgattgtccatatttttctcaaagttcgatatcttcatgatttgttagtatttaaggttgtgccctaaaattttgtgtttcttctgactttcagttttgaagttatgtttattctctggcaatgtactgtaataaaaaccaaaaccaaaacaaaacaaaaaatccgttgaactggtagatggcaaattaaaaggaaaaacattctcaattctgccaccagcttgctggggtacttgagtttctatgggcctgctttttctgtggaatgaagggtttggattagataattttaaaaattaagttcggttccaagattctgtgagtctctttttacagcacctgcttgactctcaggatagatctcttgctctatagaatatgtgatctcttgttgaggaaacacctaaaacctgatgtgcagaatggggcaggggcagaaacagttgtggtgaacagaaatagcacctgaatttcaggaggcccatatgtcagaacagtaggccttgaataggcagcatgatttattgtgcaaataaaaatggatggaaatgatttttttataaagcaataagaatggggagatttagtggctaggtgtcttagtctatttgtgctgctataacaaaatacctgagactaaagtttggtcaggttggctcatatctataatcccagcagtttgagagggccactggggaggatcgcttgagaccaggagttcaagaccagcctgggctacatagcaagatctcatctctacaaaaaagaaaaaaaaaaatctacctgggcacagtggcatgcacctgtagtcttaactactcaggaggctgaggtgggaggaccatctgagcccaggagtttgaggttacagtgagctatgattgtgccactatattccagcctgggtgacagagtgagaccctgtctctaaaataaataaataaataaaacacctgagactgggtatttgataaagatcagaagtttattttctctcagttctggaggctgggaagagcaagatcaaggtgctggcaggttaggttgtctggagatgaccattttctgcttctaagatgatgccttgttgctgcatccttggaaagggaggagcgtgtgttctcacatggcggaaagcagaagcgcaagagatcaaaaactgcatgaagcctcttttgtaatggccttaatctcattaattagggagaagccctcatggccaaatcacctcttgaaggacttacctcttaatatcatcacattgtccatgacatttcaacatctgagttttgtagaggtgacattcaaaccatagtacaaggcttttctcagttttatgactgttctgcttcacatttttgttaaatcatcatcttctatgcctgttcttccaaaggcaaatgagcaaacaagtagcaaaataatcttaactaaaattctcaaagcagctaatcatgcccactttgacaatgtgttgtatgtctgggtacatggtgcttgtggttgtgatttttgtgccacatataaattttatcaacaactggaataacattttttttggttcagataatggaataaaatatttacaaattttctagtgtttgattaagaactctaagggcgtcttttctaaccaggatagcaaaaacactgctaagacatgatccattgcttatacagaggtagggtttgaaccagccataattgagtctgtgggttggcaagatgttttaacatgtctttaactgtgagtgtctgaagaactgagaacaaagaagcctgcacttcatcaggtacttttttttttttttttttttttgaggtcgtgtctcactctgttgcccaggctggagtgcgatggtgcgatctcggctcaatgcaacctctgccacccgaattcaagcgattcgcctgcctcagcctcctgagtagctggaattacaggcgcccaccaccacgcctggctaattttttttgtatttttagtagagatggggtttcaccacgttggccaggctggtcttgaactcctgacctcaggtgatccgcccacctcggcatccccatcaggtactttttaagcgatgttgattcatataattagagtgccttctatgtgctacttgcttctctcacatgaactcatttagtcctcccaacaacgctgcaattctatgaattatatgaaattatctaattataaatgaggaaaccgagacacagagaagttaaaggaagcaaccaaaggcaacaggtgcatggtaaaattgagactcaaactcagacattctggttccacaatccatgttcctaacctctgtgctattttgtgtgactaaagttttctgaaaaaaaggtaatttatcagacatttcaacatgatataggatgttaatggtgttacagctgtgggccaagcagggatcttcttcttagtatacatttgcctcttaaagcccttcttaccacagttttaaaaacaactctcacacctgtgctctctgttttccttttcctactagactgtgaattcctgaaaaggctggactgaatctaagtcaattttttttttattgtacagtggtgcccaacataaaaaagtttctcatgagttaacacgtgatacaatgctctattccaaatcattttatcctacccttccttgaaaccagccctggaaaataaaatgtgtgctcatattcaccaaaaaaaatgttcttttaaaaagttccatttttgcaatggaggaaaaaaaaaccatgtggcaaaaaaattgcacattttatttaaaggttattaaatttgtagatttctacttgttttgtataattaaatattttcatacatactttaattttctgattgcatcacccaggtggagagttttaagactaaatgtttaagattcttgacctttgaaataattatagtataatttagtatcatataatgttcaaattgccaagggttttcattagactcaaagacacttttcttataggaatggtaaatcttagtatgttttacatgtgccagttacatctatatatttttgtaaaaattaagttctaacaaaatgcttttaaagaaattttatactttttaggaatttttgcattaatttacaccccatacttgatattctgcatttagtatgcatagagaaatacatatccagtcctagtatatcattgaacataaatgctgaacaagacagtgaagagcgttatgtagatggaagtaactacaatcatctcatttttatttttaatcacatagaagcagtgtggtatagtaattagagcacagactctgaaactagcctggttgggatcaaatattggctttgctactcaccagtgatgtgtctttgggcaggttacttagcctctttttgcatcagcgtctcatctctaaaatggtgatattattagtacctacttcataggattgttatgaagaagacttgaattggtactgcttagtgcttagaatacagactggctcagatgaagtgttcgatatgtgttagctgctgttatgatcattagtattaaggttcatagaggggtcaggaatgttagcttcttggaaaagtcaatgcctggatggggacctgaaagacaagacaaagatagtttagggagttgagaatagagggaggcattcaaggccaaaggattttgtttttcttttttcttttctctctctctctctgtgtgtgtgtgctcttctttttgtttgtttgataagtaaggtttgttagataagtaaacatgtgtcatgggggtttgttgtacagattatttcatcccccaggtattaagcctagtgcctactggttatttttttctgatcctctcccatctctcaccacctccctctctgaaagttcccagtgtgtgttgctcccctctatgtaaattcatgaattcatatgttttattcagagaactacaaacagtttgctgttgttgaaaagctaaattattagagaagatactagatgagtaggaatgaaccagtctacggagcctgggatggcccgttcttctgaagctattaatatcacacaggtctatatgatttatctaaaggacatcatatcccatatatactttttttgaaaaattgtgttttcttttctctctgtaatacaaaaattccatggttggaattatatagaatcagggtgctttctcacctgtagccaatactgctatgtattaacctgccctaccatctgcaccgtgattacctttgcagtttttttttttttttgtacattaataatgaacggttatcgaaaaggaaatgatgaattggttttagccatgttgagcttgggatgctaatgagctctacaggagacatttggacctatgggaggactgaaacccagtttatattgtacaggctttttctgctttctttttttaaaactattttttggtttctgaggtctatgacctttctttgttttctttttaggcttcgcttctttgtctttttggtgattttctcttgcatttataactgaggagtttttcagaatataccagagggataatgcatactccccaccagtaggagtacagccaagattctccaggagacaatctgggtagggcacacagctttaaaaagggattaagcagaattgggcagggcaattagaaaagcccataaagtgatttcccctccttccttgtgaatcactggtaaaatggtaaaaatatctttccttgaccttactatttccccttcctttcaccatctgcaaactccaggtctaactccttgcacctggaattttgcctccactgtaatgcatagacatgtctgtacacatggtcaggtgaaacactgctgaatgcctttgtttctcctctcccctcagcctggtatgttctcataactctctttgcattcttaatctctacacattttttcagaactcatcttagtcatcatctcctgatgccccattttggcgaattgccccttttttgggtctcccacagcaggcttggttgatctattaatctattaatctattgatctgttaatctacctttctgtattaaaatgtaatctcactgaaagcagagtctgtcttactcatcttttaatgtttagcctacagcctagtgcctggcttatacaagttcagaaaaaagtgagttaggagtgtcaactggagaactagacttgttctttattactccatagacattgtggttgaaagggcaggaatggctgaaattcttaagggagagaatgtgaaggaataaaaggaagggcaaatatttgagctaaaagaaatgcaaaaagagacccagcagagggaggacagttactcagagatcctacttcccagccccatcaagttttctcactattccgtatgggtttcaaacaactacatattcttgaatcctgaaggtgggaaaagaaattagaaaggtaaaattgaaattgagttgtttgctgttacaatactgtttcaacagtattgtaaaatcttacattaattttttcccataaaaagcttttccgttttgcctataattgtagaagtactacagtagtattttagtggaaagataataataggagctcatgatatgaccataaagttataatcagagcttccagaaacaaattttctgtgactttggaaagatatgtcactgcattcctcaaaatacttaatttgcttggatgatgttttgttttgttatgttctgttttctcaggcgcagtgccttccatcccatgttacaataatggtgtgggcgaaaggtttagaattctgctttccaatgcaatatttgctagttctttggaaaataggacttcaagaaatgtcactgctcagccaacacattaaattgaaaaatagtaatacaatgaggagtgtgtgtatggagagtaggcatgatcagagttgactatatcaaagtataaatcattctgcacatataaatcattaatttttgtttacttgaaatatttaaattagctgtctttttttaaaaaataaagcaattatccatcagaagtatttataaatagtaagtgtttctgtagggccaaaagtaaacatttaagtgccttatcttaaagtttaggaaaataagttaactaggtagtttgttatcatacctatgtatttggtgaggagcaaagaaactattttacaaggttctgaaaaatatgtaacttaatattgaaacatagagataactcaaaatatgcctcaagcctcagagctcttcttttgtaataaccaataatttataggccatcttaaagaagaaatagaagctatcagctatgtatggacttcaccgttgtttttttgtgtttgtagacaagctatcttaggtcactgctttagcaaattaaattagctcagcattcactcaggagatgggtgaggaggaaataaaacaatggagatacagatagattggccaggaagctttagggtgtggggtagttggatgcagaggctatttagaaaccaggcttcagaataatggaaagaattgaataaatcctatgactctactaatgcaccaaagttttgttttgttttgttttttagtacagtgatgaaatgttaggtgatttttttaggtcaaacataatatgtaggcacagcagccaggctggagatgaaagtttgttcgtgagggattcaacctcaagagctctgtcaagtgcaggtaatagaggaattgaagatttactttagagtttcaggattaaatgaggtccagagctaaatctgggtagatttggaagagcagtcagatatgtattattctgagcaggactgtcattaacattttagttcaattaatttggaaattgagtagaaattaggaaattaggaggaatagctgaatgtagtttggagatgatcatgagttgagttttagatctgttcagttttgtatgattatacgtaattcaagaggagaattccaaaatgcatttggaaatatacaaatggagctggagagaaggagttagaggcaaatatacttattcatatttgttctcatagaggagacacttcactataaatctggatgagattttaaagtagagatttcagagaaaaggtcagatggctgagaactgagtgactcagcgatcactggaggccagccagtttggtgggatgggagtgtgggttcagcttgtgtgcttgggagacaatcccaaggaaagttcagatttttctccagaggtaatatcagatagacagtaagtcagagtaaggccatactgataaaatagcctagaggagaggtcacagtgcaaagaaaagaggacgattatctggctgagaggaaacaagaaatgtgagggggagacagactggagataatgatatcatgaggcagggaaagaatgttttaaaaagaggaagagaactatatcaaggtgcaccagatattgatgacaggttcagtaaaatgagcactgaaatatttctgttggttgtgacaacatggacatcatttagtgaccttattaagagttgttttcatggagaagccacagtgatgtgggttgtagaatgtgtaaacagttctagaaaggccaaaattcagggcagaagtgcaagtccagaagggttgttttcttggtgtgtattattttgttttaagataggaacaatttcagtatgtttacattcagctggaaaagatccaggagagaaggaacatttgaagatatgagaaggcaataatgataccttcttgacaaaccagcatatagtgtatttagactttagatctatagtttaatacactgaactaaatgaatgcattgacattgtcaaagcaagagaattgagcaaccagagaagtatttaccgaattgttaacctcgatggctctgctctgtaagggttatgtggttgactaattttagaagacttctcagtaacctctattgaatgatttggtacaaggacacgtaacctttggtgactaaaaagcctttctcaaatccctactcctacgtcattccatgagcatttattgagtttgaatggaggggattgatagggccttaggattctgagttccaagtctctgacttgtgttttggatcacaaattgattaaaatcgatagcatcttatattttatgttcataaggcccttaattgaatttaatcatagcttttacacatagtatagtataagaagtaaaaacaaacatagctaagcaaacagctaaagagaagaaaatataagtaaagaaaccactgcataatgcagacaaatgggaaacagtaggttaattttaaaatatatttaaagtaaatttatgctttagtatgctctactcatcattgaattactatcacaaaggcttgaaaaggttaaagcttaatctataataaaaaggagttttgattaattgtgataatcttttacacagtgattctgatcatttttgatcacatgggcttctttgagaatctgacaagagttatttccacccgcaaagttttaaaaacagacaacaagatcctgttagcactgtgttattcttttttttttttctttatactttaagttctaggatacatgtgcacaacgtgcaggtttgttacatatgtctacatgtgccatgttggtgtgctgcacccattaactcatcatttacattaggtatatctcctaatgctatccctcccctctgcctgccccacgacaggccccagtgtgtgatgtttcccttcctgtgtccaagtgttctcattgttcaattcccacctatgagtgagaacatgcagtgtttggttttttgtccttgaaatagtttgctgaaaatgatggtttccagattcatccatgtccctacaaaggacatgaactcatccttttttatggctgcatagtattccatggtgtatatgtgccacattttcttaatctagtctgtcactgatgggcatttgggttggttccaagtctttgctattgtgaatagtgccccaataaacatacatgtgcatgtgtctttatagcagcatgatttataatcctttgggtatatacccagtaatgggatggctgggtcaaatggtatttctagtactagatccttgaggaatcgccacactgttttccacaatggttgaactagtttacagtcccaccaacagtgtaaaagtgttcctatttctccacatcctctctagcacctgttgtttcctgactttttaatgatcaccattctaactggtgtgagatggtatctcattgtggttttgatttgcatttctctgatggccagtgatgatgagcattttttcatgtgtctgttggctgcataaatgtcttgttttgagaagtgtctgttcatctccttcgcccactttgtgatggggttgtttgtttttttcttgtaaatttgtttgggttctttgtagattctggatattagtcctttgtcagatgagtagattgcaaaaattttctccaattctgtaggttgcctgttcactctgatggtagtttcttttgctgtgcagaagctctttagtttaattagatcccatttgtcaattttgtcttttgttgccattgcttttggtgttttagacatgaagtccttgcccatgcctatgtcctgaatggtatttcctaggttttcttctagggtttttatggttttaggtctgacatttgagtctttgatccatcttgagttaatttttgtataaggtgtaaggaaggaatctagtttcagctttctacatgtggctagccagttttcccagcaccatgtattaaatagggaatcctttccccatttcttgtttttgtcaggtttgtcaaagatcacatggttgtagatgtgtggtattatttctgagggctctgttctgttccattggtctatatctctgttttggtaccagtaccatgctgttttggttactgtagccttgtagtatagtttgaactcaggtaacgtgatgcctccagctttgttcttttggcttaggattgtattggcaatgtgggctcttttttggttccatatgaactttaaagtagttttttccaattctgtgaagaaagtcattggtagcttgatggggatggcattgaatctataagttaccttaggcagtatggccattttcacaatattgattcttcctgtgcatgagcatgaaatgttcttccatttgtttgtgtcctcttttatttcgttgagcagtggtttgtagttctccttgaagaagtccttcacatcccttgtaagttggattcctaggtattttcttctctttgaagcaattgtgaatgggagttcactcatgatttggctctctgtttgtctattattggtgtataagaatgcttgtgatttttgcacattgatttttatcctgagactttgctgaagttgcttatcagcttaaggagattttgggctgagacgatggggttttctaaatatacaattacgtcatctgcaaacagggacaatttgacttcctcttttcctagttgaataccctttatttctttctcctgcctgattgccctggccagaacttccaacactatgttgaataggagtggtgagagagggcatccctgtcttgtgccagttttcaaagggaatgcttccagtttttgcccattcagtatgatattggctgtgggtttgtcataaatagctcttattattttgagatatgtcccagcaataccgaatttattgagagtttttagtatgaagggctgtttaatttttcaaaggccttttctgcatcttttgagataatcatgtggtttttgtctttggttctgtttatatgctggattatgtttattgatttgtgtatgttgaaccagccttgcatcccagggatgaagcccacttgatcatggtggataagctttttgatgtgcttctggattcggtttgccagtattttactgaggatttttgcataaatgttcatcagggatattggtctaaaattctcttttttcgttgtatctctgccaggctttggtatcaggataatgctggcctcataaaatgagttagggaggattccctctttttctattgattggaatagtttcagaaggaatggcagcagctcctccttgtgcctctagtagagggtagagctgtgaatccgtctggtcctggactttttttggctggtaggctattaattattgcctcaatttcagagcctgttattggtctattcagggattcaacttcttcctggtttagtgttgggagtgtgtatgtatccaggaatttatccatttcttctagattttctagtttatttgtgtagaggtgtttatagtattctctgatggtagtttgtatttctgtgggatcagtggtgatatcccctttatcattttttattgtgtctatttgattcttctctcttttcttctttattagtcttggtagcggtctatcaattttgttgatcttttcaaaaaaccagctcctggattcattgattttttgaagagttttttgtgtctctatctccttcagttctgatctgatcttagttatttcttgccttctgctggcttttaaatgtgtttgctcttgcttctctagttcttttaattgtgatgttagggtgtcaatttaaatctttcctgctttctcttgtgggcatttagtgttataaatttccctttacacactgctttaaacgtgtcccagagattctggtatgttgtgtctttgttctcattggtttcaaagaacatctttctgccttcatttaacaaaatgtacccagtagtcattcaggagcaggttgttcagtttccatgtagttgagtggttttgagtgagtttcttaatcctgagttctagtttgattgcgctgtggtctgagagacagtttgttataatttctgttcttttatatttgctgaggagtgctttacttccaactatgtggtcagttttggaataagtgcgatatggtgctgagaagaatgtatattctgttgatttggggtggagagttctgtagatgtctattaggtctgtttggtgcagagctgagttcagttcctgggtatccttgttaactttctgtctcgttgatctgtctaatgttgacagtggggtgttaaggtctcccattattattgtgtgggagtctaagtctctttgtaggtctctaaggagttgctttatgaatctgggtgctcctgtattgggtgcatatatatttaggatagttagctcttcttgttgaattgatccctttaccattatataatggccttctttgtctcttttggtctttgttggtttaaagtctgttttatcagagattaggtgtgcaacccctgcctttttttgttttctatttgcttggtagatcttcctccatccctttattttgagcctatgtgtgtctctgcatgtgagatggggctcctgaatacaacacactgttgggtcttgactctttatccaatttgccagtccgtgtcttttaattggagcatttagcccatttacatttaaggttaatattgttatgtgtgaatttgatcctgtcattatgacattagctggttattttgctccttagttgatgcagtttcttcctaccatcaatggtctttacaatttggcatgtttttgcagtggctggtaccagttgttcctttccatgtttagtgcttccttcaggagctcttttagggcaggcctggtggtgacaaaatctctcagcatttgcttatctgtaaagtattttatttctccttcacttatgaagcttaatttggctgtatatgaaattctgggttgaaaattcttttctttaagaatgttgaacattgccccccactctcttctggcttgtaaagtttctgcggagagatcagctgttagtctgatgggcttccctttgtgggtaaccagacctttctctctggctgcccttaacattttttccttcatttccactgtggtgaatctgacaattatgtcttggagttgctcttcttgaggagtatctttgtggcattctctgtatttcctgaatttgaacgttggcctgccttgctaggttggggatgttctcctggataatatcctgcagagtgttttccagcttggttccattctccctgtcactttcaggtacaccaatcagacgtagatttggtcttttcacatagccccatatttcttggagactttgttcgtttcttttactctattttctctaaacttctcttctcacttcatttcattcatttgatcttcagtcactgataccctttcttccagttgatcgaatcggctactgaagcttgtgcattcatcatgtagttcttgtgccacagtattcagctccatcaggtcatttaaggacttctctatgctggttattctagttagccatttgtctaatcttttttcaaggtttttatcttctttgtgatgggttcgaacttccccctttagcttggagaagtttggtcgtctgaagccttcttctctcaactcgtcaaagtcattctccatccagctttgttccattgctggcgaggagctgtgttcctttggagggggataggcactctgatttttagaattttgtttttctgctctgttttccccccatctttgtggttttatctacctttggtctttgatgatggtaatgtgcagatggggttttggtgtggatgtcctttctttttggtagttttccttctaacagtcaggaccctcagctgcaggtctgttggagtttgctggaggtccactccagaccctgtttgcctgggtatcagcagtggaggctgcagaacagcaaatattgctgaacagcaaatgttgctgcctgatcgttcctctggaagcttcatctcagaggggtactcagccgtgtgaggtgtcagtctgcccctactggggggtgcctcccagttaggctacttggggatcagggacccacttgaggaggcagtctgtccgttctcagatctcaaactctgtgctgggagaaccactacttcaaagctcagttggaaatgcagaaatcacctgtcttctgcgtcactcatgctgggagctgaagactgcagctgttcctatttggccatcttggaaccacccagcattgtgttattcttgaaggtaactgaagagattggataacttcagttctaaaatcaaacatctctaagaactgaccagataattaggtgcctactgagccattgtaatgtttttgattttgaggtaggaaaactgcatcaggctatggcagatggctgacatgatctgacttactatttttaaacatcactttgccttttgtgctgatagtggactacaggtacacaaggtcccaaaaagcgagacctgccatgacaccattgctgtgattcacatgggaggtaataggattggatcggggtgacagtgatggaggtgatgagatgttgttgcatttgggtttatttttaaggcagaacaagatttgctgaagaatgagattttggtgtgaaagacagggattaaggatgactccaagtttctgggcctgagcagttgaaagtaaggaatggccattaactgagatgagaagactataggaagaatggggtttggttcatggaggaaggtcatgtttggtttggaatatattgaatttgagatacccattatctgtacaagtggtgatgtggaggaagtgtttggataagggagttgggagttcaaaggaaaggtctgcagcttgagatatgttttgtgagttttcaaggtgcagaatgtatagtggatgaggtcactggcaactggggttctcaaccctggcctctggatatttggagaaagatctttagggcaaagggattaggaaataaaatacaaatcagcgattatgattcatttggaatggagtgggtccaaggtatcagcatcctttagaagctccctatatgattctaatttgaatgcaggattaagaactcttgcccagaacatagataaagtgcaaaagtactccaaaaactaagccctgggccattatgccactgtagaaaatgaagagaaactatcaaaaaagtgaggaagagtagctagtaatggagaagggataaagaggggcagcttggaaaccaaatgaaggaagtattttaaaacagagggagtgatcatgtgtcaaaagcaactgagaaatccagtaagatgaatgagaagtgaccattgaaattgtcacgtagaagtcactggtgaccttcacccttttagtgttgtgatcgggctagagtgtgattgagatggattccagagaaaatgagaaaagaaaaattgcaaattgcaaatctggattactctaccaaggagttttccgaaaggagaataagtaaaaatgttaggatataaaggcgaatgtttttagaatggggtacatggttgagtgctattggtaatgaactagtagaggagacactgatgatgcaggagcatgatgtttttgagaaggtgagaggggaggagattcattacaaagtaccctgtggtgttgtaggggagtgtatgtgcatgcgtgcatgtgtgtgtgtgtgtgtgcgcgcgtgtgttttatctctctcagattttaaagaaagggtcacctggggcagtggctcacatctgtaatcctggcactttgggaggccaaggcgggagaatggcttgaggttaggaatttgagaccagtctggacctcatctctacaggaaaaaaaaaaaaaaaaattaaccaggcgtggtgctgcgtgcctgtggtcctagctactttacttaggaggctgagacaggagcatcacttgaatccaggagcctgaggctgtggtgagctatggttgtgccactgcactccaggctgggcaacagagtgcatgaccctgcatctaaacagaaaaaaaaaaagaaaagaaaagaaaagaaagaaaaagaaagaaagagaaagaaagaaagaaaagaaaagaaaagagaaagagaaaagaaagggcccatgcctgcagagcactattttttacagtgacttctttagttctgtgtcttacacatatgaggcactttcagtttgttcaaatggagctctttcaaataaccggtaggatatggcatagtagatttacaagttttggagactttctacctaagaaaatattttatcatttgggacgatgaaaaatacactaaaagtttccattgattttagaagcatttcaaaaaattatttcttagttacaataatagcactagacactgcataatactacaattcagaggaggaagttttggggaaaaatacagattgtgcaggatgtttgaattttatgacaaaaactgtctgatgactcatgagtgtcttgtagtttataaagggtatacatagcgaaaaatagtatcaaagtgttattcattgaatatagctttcaacttcagttatttgagataaccacctatagtaaaaccttatctcagatgctcatgttaaataaaaatattttctttatattttgcattagtctaaactttactttagctaaaatattttacctttttgaaaaatgagttgcattgttgagggtggaagagtgagtatatttaaatcagctggactaaagaaacatactgatgtgtaatacatgccttaattcatgtccaaatgccacatgatttaccttttggaaatctagagaatggagagcattctaaattttaagcttagatggattatatttatattctttgtcattaactgaaagtacttcttataatactatattttatattttttattattgcctttggtggctttataaattacctgttttccccccaatgttttgttgctatattctttccatttctttttgtgtgcttccatctctgtatatacttaaaagatctgttgtttgcctggctgaattgacaccaaaatgtttaagaacagagtatgttaatattgggggaaaattaatttcggacattaagtttttaaaaaagaagatttcaaaggaataggaacaaaagggtaccacttatgtcgaggggtgtgactgttttatgctctagtaggaggagcatctatctttgcagatcaagcctgccacctccagagttttggttatctcattttggttgttactccaaagtacaccttccatatctctgtctgactgtctctgttccccatgtctctttctcatctctccttcctctcttctctcatttctctatttcatactttctctccctcccctccccttacctgtttcatttgcaaattttacatgatttcatttaattattgactaccatttatagaaacccaatggcagtgattaatgacactttccacaataatagtgtaatactttttcagatacttttattcttagcttatatgtttgtgagttatgggtacatagcttaaaagaaatagctccaaaaatctccatcaaacacccggaacttttcaacaatgattctttttttctagattgaattagattctcatggtatttgaattgattattattcctccaaaatacatacttgtttagctatttgctgtttttttttaaaattacattccaagatgacccaccctgactcccaaaactaactgaagcaacatagaaatactaatttctcttagaaatgcttttattttttaaattacttacatatagtgttaaactattgtggttttgagaatattttataattaatatatataattctcaactagtattttgtaaaatagtatggaaggaacctcatagtttaaagttgacatatttcttaaaaactcttgtaaggggaatttttttaaatataggtggtttaagttgaatataccaggaaggtattaggaagattcacttatgaacctccagctcaggggtccttagcattgggggagggtccaatgtaagtctgagaaaagataaccaaattaatttcactaatttctaaactttaaattaaatttgttatttctctcaattatacatataggcaataaacttcagtggcattagtagtacctgtgtctttgttgatgacattttcatatattaaagttgttgcagaaatcataaagtattatatatactaatcactacttttaaaatagtatttatcagatcaccactagaacttgttattaatgtctttaaaaagaagcacatatttattctacctcaactttaatattatcaactatagtcatagggccacataacatttaattcaactatgaacgacatatagaacggtggtcccataaaataagaacactgtatttttactgtaccttttctatgtttacatatacaaatacttaccattgtgttgcaggtacctacagtactcagtacagtaacatgctgaaccactttgtagcctaagagtgataggccataccatatagcctaagtatgtcattgactataccatccagatttgtgtaagtgcactctctgatgttcatacgaggaaatcacctaatgaccccttcctcagaatgtgtccctgtatttaaacataattggtttccttcaaaatcctgggtattctatgttatggatttaaaaatactttatctccatggcacaccacagaaaactaaaaatgcctgctcttgtccctcggaatccaaggcattctttatagtaaaagtaatttattttgtaacatacatgttttataaatttgcatttctgtatgtaattttcataatgcagagaacacagattttttttgaacagcttctttttgcttacattaaattgaaatgataaaaaaggacatattcaatttctcaccttaaaaaactatgttaaatattaaattcctaagtaacttgttttcatgtttgcattttaatgtcatgcttttaccagtgcatagtcagcaacgccaggatgcagaagaatggagaaaatgaacttcttgggttttatatgccacaatttagatagtcttaatttaaatttccataaataagtgcaggagaaaacagaggaagtgcttcgaagtcaacaacctggtgacacatattttttagggttttcaggcaaatcttcccatgggattttaattgatatgcaacatagtgtggcctcaggcccccttccaagcacaggactctggtaatttgtacaagctttccttcctcctctatacttgactgaagggaaaaatggaagatggtagacatcctctcaagtggatgtaggaggtaattagaataataaaattgaataattattaagtagtttgctcaaggatattaatcattctgcccattttgaaggagaaaaaatattcctacaaataaatagtagttgtctcttagaagactgagaaatccaggagtttgggggaaatgtgactataattgaaagaaaagagcaaaatggattaatatactagttttccaaagaaatattaaacctgcctaaatttccactataacttctcttgggaaatcaaactggaggaactggacctcttgggaatactatcaccataacataacataatttgaagttgacactagaagttgaagtttatttttttcctaataattatgctcagggaaggatgcagaaattgcattttggaatgacagaagagtagttattttagaaggaacattttaacatctatggtagatatctcctagaaaatgtgttctgtggagtgacaggagaagctaaaaccaaaagccatcattaccttaggacataaaactgaattgcatggagtcaacaggtgtttattaagggtctgctgtatgcccaggccagtgtgctggagtttgtagagaagtcctgttttattttttaatcaagtgcctttgattttttgttcctgttgcttttaaaaattacacccttagttagaaataagtatgcacctactggctcttgaactctaattaaccatgaaaaaaatatatatgtatgtgtataaatatgtttaaaactggcctcctggcccggcacactgacttacaactgtaatcccagcactttgggaggccaatggggacagatcacctgaggtcgggagtttgagccgagcctggccaacatggctaaaccctgtctgtactaaaaatacaaaaattagccaggtgtggtggtacatgcctgtaatcctagctacttgggagactgaggcaggagacttgcttgagcccaggaggcagaggttgccgtgtgccgagattgtgccactgcactccagtctggatgacagagcaagcctctgtctcaaaaaacaaaaaacaaacaaacaaacaaacaaaaagaaactggcttcccgttatccagaattggatttcctgatgaaacattgaacttacttgtgactctgtcattctggcatactatcctttcagaaccaaaaatctggattctctgtcttttcaactcccctgtctatactagggagctaaacactcctgaagaaaccttgatgaccataaaaatcactgtcactatgcatgtgtggtctcaggtctcaaccagagcctcagaatccctccacagaacttcaatatgtcccaaattcctgcaacaaatcattcttgagcacttactctgtggcagataagtgccacactcttctaggtacagtttggggacacagcagtgaactacaaagacaagcagacctgccctcttccattttccacagtggccatctcattttggtgctgttctttttaaagaagcacttggcaactctccctccccctcaggggaagaagaggccatccagcttttcctcagggtctctccaccctgggccctacctacaaacttacctgattctgagcctgtttttaccttccattcaaaggaggagatacagctcttcctgttgcagcacacaccccatcactgcccatcttttcatacactcactccattgagtagccctttctgcattcggtttgaagtttcttctggagaacagtgaacatatgtcagtcttttctgtctaaaaatatatgtgtagtgagtgtgtgtaggtgggagtgtatctcttcatggactttgcatcctcagttttctccttctgtttacaaatagatgtcttggaaagatagctatgtgcggtccctgttccctcacttttcagtcactcctcacgtcactgctattcatttctagccctaacacatcgccaaaatttctctggccaaacagagtatctgacacaacctccttgaaatattgttctctctcacttccatgggatctccctttcctagagtttctacttccatgtttactcctctgtctcctctgccagctcctcccttccttaaatgcttttgttaccttgaatcccttgtcactgagtacattcttcctgggtggttgaataagcccattcactatgacagtttcagccacctttcaccccccagccccagactaactaccacgcaaactccagatcatggtctgcagctgccttttgaacattttcatttgagtatccccagacttagcaaggctcacactcaacatattttaaaccaaactgtttttcctcctggatttcttccttagtaaatggcttcagaaaccagggagtcacgcttgattcttctcatcactgcttcatcccaggtcttatcaactcatgctaatcctactttcttgatatttcctcaaagtcatcctgtctgaccccactggcactatattatcactgcatgtcgttcctgcttcctcatttctgacacggaaaattgaagatgttttacctggtttctttagatccaacaaaaatatggagccactggcatctctaaaactgtctgcttgcctctgtgtctttgcataacttccccactggctggaacaatctttgcttttatttcatctaacatatgcttcttctttaagacataactcaggaatcacccttactttctccttctaccctatgttctctcctcttccctttcagagctccatcttacaaatctgaattggatattggatattccatccatttgtgcctccgtttttcatctgtaaaatgaggttaataatagcatttatctcataaaattattctaagagtttagtgagtaaatatttataaactacttacagcagtgcctggactttagtaagcactatataaaaggttgctaaataaaaatttaaaaaatacaataaaatatggaaacactatatatactggtgatgagaacagcctttggaatcacatagatctaaatttgaatcccagacctccccttagtagctttgcacctcaagccactatataaagattttgaacctcaggttcctcatctataaaatgagccaaatgttcaccttatgagattgtctgtcatgcagaggtaatgcctgcgaggcacttactatgtaacactccttgctcattatttactccagttgggcgtggtgactcatgcctatactcctagtagctcatgcctgtaatcccagcacttagcctggcagaggcgaaaggatagtctgaacccaaggagttgaagacctgcctgggcaatatagtgagaagctgttctccacaaagagaaaagaaaaaaaggacaaaaaacgaaacaattgaactcattacttactctaccagcacgatgtgtttgtccaaatcacaacagttatggcactgtattgtaactatatttttatttacctacattttacattccttgatctttgtctctgaagtttggacagaatctgacatgtagtcaaatgctcaatgaagacttgttgaatgaacatttaaccatgaaggcattgtctccaggctcctatgctggttaggaatgaagactgtatttattccattttttttttccacttcctatgcactcactgctctcagagagtcttttgtggctaattccatgtgcctctaatgtctttaatggaccagagtacacagtttacactttgaccattggccattatttatatgaagcctactttccaggcccacattcagcatctacgacaaggcaggcaaggccctgtctttgtggggtttctgtacagtatggctatttgctcctggggcttagccaacttacagtcaacttatattccgcattaattaactttccattctgttttgaatattgcattaaacccagtaatggtcctgttcaaggccaagaaaataccctgtgctagatttaactatctattagttatagaaaatagattatatcttcctagaactttggagcttgaaacaaacttagcattttccctttccttgtatgtgtatcgacaccaaatgaaatgacctgttcaagatattcactcaggcaattagtgacagagccaagaccagaaagctggttttaagtttccagcatcacaatccttatacatacactaatacttggctgtctttgccacttatgaagatggaagggtgatcattaattgaaatacctttgtttttgtgcccccactatgttgtgtccctgttgctaatagccttatttaaaccaaacaaacagctgtaacaaccacagacacttacaaccctttctttttgtagttctggcattagcttgcccaaatggtaataggaggtaatgagctgtgacagtaataactcagttggggagtggctcagacgaaacacagggaattgggaagcacctcaggaagacggttttaattttaccttattttccccaatttaaagtaataatacactaggctacaaaatttttattgcataagaaaactaggtttatctgttttcagcaattttagagtatacttgcaaacaacatgttcatagatcgtttttagctctggaattgtttgtacactaaattaaggcggaggtatttataccttataatttcaatgtcatgctgtcctgttcatctgtggcttgcaatagtgccttaaaataatcaaatggtattaatagataacctgggtggagagggaggaatgtggaaagagtaacaatgtcatcattgattcacaaattaattccataaataataggatttacctcctgtgcactgctttgaaacgtgctttggtgtctcatttcgctgtaacatttcactctgcttgcttcgcttcatcttgcctggcctgttagaccgctgtgcttctttggttggggcctgtctcttctgtcagggctggggagtgcatcctgggtcttctcaggcgaggctcctcctgcctgtgtgaggtctgcacctcctgctagggatgctgcccttgcctccaggagtcctacaggaacagtcactgttggggacctctcagccctttggattgcaaaagtgccctttggactcttgctgagccctggctggtcaagtgcctggagaattgttgtgtatgatcccagtcctgtgaatattgtcagtatcagtcagccttcttttagtgtgtttgtttcctcccatgctgccataaagaccttatgtcctaggtgacctggccaaccctgtgcatctctgcagtaggctaatatcagtgactgaaaacactggatgtgaccaaggtgttattttactcatcatcatcatcatcatcatcatcttttacagaatcacccagtgggtacattatggtttaagttttgttagcaagacaaaactgatttattttcatttgttacttgcacaatgtataagccaaggacaaatgaaaagagatgaagctgaaatgtgaattgtgaaataaacacagttgggaaaataaaattagaaaatatattaagcatttgggagagattttttgggttatttttaccccaatatgaattttcattaaaactagacgatttacttgcatgtatttttgtcctagccataaatggtattgttaccaacttgagtgaactgttgcacattgatcctttctgggaaaatgtgtttaagatctaaagtagattttattatccagaaattatattcacctttgttattatttaaacttcttatattagaaatatttcaactggccaactgaaaatagccagcactgaataggttcaagtaaagtatagtttctagcttctggagaaaataaatagataataattgaaatatggaaaaaataggttattatttttaaatcttctgctgtagccaaacacaaggttactaattctctctgggcagacttatgcttcactcctctgcaaattctgtttcttagagttgccttcttggttcattctttcaagtgtttgagctgtggtcagagccttttacaaacctccttaggttaaaatagaatggtccgatgtccgtgtggtaatcagagtaaatggaacataggtaggtggagaggtgtggttttcctagaataaatattttgctatcatcttcactgctgtcacagtaataatatttagtaagcacttgcatgttaaatcctttattaagtacttaatgtgcattatctcttttaatcttcatcataaccctatgaggacagtaatgttattaccagctattaaagcttgtgatcttaaaatgtagagattcagtatgtgaatgtaaatattatttgcaccattgatattttctagcctttctttccctcctttctgcccaaaaactgactttctgggtaaaaaattttaaataagcacttcaaataactaaacttttacccctcttcagatttctgtgttaagcttctaagaatcaaaatattttctgagatctatctatctatctagtgtgcgtgtgtgtgtatatatatatatatatatatatatatttatatttcctggaatttgttttgttttgcttttggtatagagtctcaccctgacacccaggctggagtgcagtggcatgattatggctcactatagcctcgaccttctggggctcaggtgatcttcccagcttagcacccccaccccccgaccccctccccaaaatagctgggactacagatactcgccaccatactcagctaattttttttttttttttggtagaaacagagttttgtcatgttgcccagggtagtcaaactcctgggctcaagggatccgcccaccttgggattctgcctgcctcgggattccaggaatgaactaccgcaccccagcctaacttcctagactttgtaaaatgcatctctttagaagggactacttgaccagtgctagagttaaggcatgaccaacaattactggattcgatgtctctgagaatttggaatatttaatgaatcaaccacagatcaggcaatggggtaaacaaatagaaggaaaaaatctctgctatcctctcgctgtcatttaaaatatgaaagcaactcccataggatggagatggagtctaggatttgcacctgtagtaggaaacttattgaggagtcactttgtggggtgtgggagggcagtgctgtttttttttttttcctaggttcttttgactttgttgagaggaaagataatagtaaagattattgttcaatttcccaaagtatggtgttctttgtcctgcagtggaaaatgtagcttttctctaactttctttttacctcctgacccatctcactttgttccccactaggaaaatgttgactggattctggctaagatgtgtggcctcttgggagagtcttgtgccagagcgttctgtgtaggaggctcactttaggccaatttattcaggcagcaggtcaggctagggctgttggccagaagtgctgtgcgtcctctgtcttggagacatggagctacttggagctgagctaccgtgtggtattagtaaacatttcccgcccctacacacacttgaggagcagaactccccagagatgtctgtgtctggtccctcacagctgggttttcacagaggctagatgctcacttagcaatctcggctgtgattcaggataaccacagcctgcttctagcttgctctttgattttcctattgggaaagaacagtcacagtaaagcagtatctaggaagaggaaagccttcacccagtcagacttctgcacagagtcctgttataccgccactgggcaggtgatagtcgtagcagctaaagaatggggaacaactgggggtgctctgtggcgttgatgttaaagctacagagtcaggtttgacctcaaagcaatttcctaaattactaaatacacataactcttattgttcatgctttaatccatggtctttggcatattattggcctgttaaatgctaataaacctttgtttctcagcatgtagtttacatgatggggacttgattaagaaagtactttcaagcatcttatttcataggaaactttattagagataagataagacccattcaaatatgcattctcttaaaaatgggttgtgagttattctcagaattctctgctgtctgtcctttcctgtactccactttagctgtttggtatctctgttccaagaaattcagagcacctgccataccacatcttaaaaggaggaaatgaaagagataaaagaggctcgtttagaggcgagctgagtttattttgtaaatagttttctgatggctcaatcagggttcctttcactttaataaactgcattcctcatattccctagtgtaatttggccacatactgatcaggtatccgtatcaattgggataatttcattataaacttgtttttacaaagctaatcttcactctcattttaagcagcacagagttcctgggatcagtcacagacattttcaccagacttctaagatgctgtttaattcagttccaattgttactttaatgctgttgagatgctagaagctctccacataataggccagctgcctaagcgtaacactgatgacctttcgtaggactcaaagattttgtttgggattgtgtcttcagtaattcataacaggttttgttgctttttaaatcaaacatagtaaagatttccttttatgctctccttttagctacttggcttctggagtgttactctgttttcctaaatttacagtagctgccagtcttgtgctgagttctcctccaagtacactgaattgtgcaattcttgcttggcccagttttggacaggcatctttcccagaaccaagtggtcttctcagaggttaaacagttttggcaaaaactgtaaataatgactgaataaaaccataaaaactgaaatcttaagaacaggggaaaaagatgattcctgactgcaagccacatggatgcagaggacccatttttttaaaaaaagtttgtttctctattcaagccttcttaagtttgatcattcttatgatcttctctttgcctcaaataaaaccaccattattgtgccttttatgactcttgattcctgttggcagtggtaggaataggaactataactactgtttcttcttagtttattttaaccttttcattaccctgagtcacagtcaaactatgacttagaaatagaaggttacaaatagaagggttttataaaaagacccaccaaaaaaaaaattcatttttgacaaggaataacaatcagatcatttaaagatctggtagaatttaaggaaccttttttggctaattttttgttgtaatttctagatatttctctatttaaaaaaatacagaatatgaatgtgtttctggtagatacttctgtagatacatgttgtttaatatctctatgatcttgtaaatgcattttggtttgtggcttctctagatgcctgttaatagatttggtttttcagagtaacccaaagtgcttttctagtaaattataaaggactttgttttaaaacaatgtctccattttgtaagttttaatatttacataaatagctactgcatatggagctcttgatcatgtaactgcagtccttaacgtttatgttttaaatttatagatttgtttcttttgattgagacatcatctccttccacactgccttctctcttatgtctattttaacaatgcaactggcagtttattaattcttcaacttagtgatgacttgttcttacatattgaagggtaacatttactttcaactttttattaaaatgaaaattcagaataattttttaaaaagaaaaggaacacaaaccaaggctaaaaacagatagatgaacaaaacaaatcagcagaaagttttggatttgtaactgaccttcctccaaggaacatcaacccagtgttagaagtgacccactcctgtagcagcagcatagcttgctgactgagagcatggtctcaggaggttaactgcctgggtcctgatcctgtttctgctactcactccctctatgaccttgggaaaatttcctaaattttctgtgaatgagtctctgcattggtaaaataggcataataccggtatgacttcttaggagtattattagaataaaattaatcaatatttataaagaccttacaagagagtttagtacaaagtaattttctaatttttttcaaaaatgaaaaattgatgaaaacgtctctacttttaagataatatgtttctcaattttgaaaacagcaaataaatactttccctgcattgaagctagagctcccattctagtaaagcaaccacttacaccaattagttatagaaaacaggttttgttgaggaagataagttagcaaaggagtgttggatctatttagacctaagaacttaaaaaaaattctttgtctactaaaaataaaatgatattttaacaggcaaattaatttgtaaatcttatttactaaagtaggagttatgagagattcatttcttggcttaaggcttttaaaatcttaatgacatgtgtcattgtagtctaagatctggaagaaatattaattctcaaatgaatatatcctatgggaggcaactagtggtttagtttggaatgtcactcccatctctcttcatcctcagggctattgatctcacaccagtcacatccaatctctctctcctaattgcttattggtttcttccgcctttctgtcatcagcatagctgagttccttggtttgaatcagacactaaaacttttttatttcattctgctatcaaatcttattaacacctcttcttctttttgctaattatcagatttttctatctgtcacttaacttcctcagccatgtaatcccatatccagtgttatcaaacaagatttaatttggctttcccttcctcaccttaaactctctgagttcaaaagttaacttatctcccttttgttagtttattttaattaagacaagtcacattctgagagaagacaatcatttaacaaaggaccagtatctcgaatatctgaaaaacctttacaaattaataagaaaaaggaggcaacccaatataaaagttagggaaaaacatgaacatgctgaacactcatttcaaagaagagaaaacatgaatggccaatgaacatgaaaaaatgtccaaacctattaggaaacaaggaaaggcaaaataaaaccaccatgagacgccatttcacacacaacttgcacatgttaaattgtgacagtttcaaagattggtgagaatgtggagtaatgagcactctcatacttggtttgtgggagtaaattttggagcaacaatcttgggaacaaatttggcattatctaataagattaaagatgagcaagcctgtgacccaaccatcctactgctggttacttagcatgtatgttaggagacttggataagattgtttcaaactgcaatgttaagaacagcgatgttaggagcaccaaaaacactgatgatgaccaaaatatccataaatagtagaatgaggctgggcacaatggctcagacctgtaatcccagcacttcgggaggccaaggcaggtgggtcacctgaggtcaggagtccgagaccagcttgtccaacaaggtaaaacctcatctctactaaaaatacaaaaaattaaccaggcatggtggccggcacctgtagtcccagctactggggaggctgaggcaggaaaatcgcttgaacccaggaggcggaggttgcaatgagccaagatcgcgccactgcactccagcctgggtgacagagtaagactctgtctcaaaaaagaaaaataaaaaatagtagaatggatacatcaatcattgtatgttaattcaatggaatactaagcacctggaaaatgagtgaactacagctacacgaatcaacatagataaatctcaaatacaggatgttgagccgaagatgctactcacagcaatttgcggagtatagtttccattctgatatattttttaggggtgtgtacacatgtactgctgtgaaaaatacaataaaaaacaagggaaagatcatttaatatttaatacttaagacagtggttacttctatggagaggaagatggattcaggaaaggactaaaggaggcttcaaaaatattgtaaccgtctatttctaaggctggaacgagacattctttcccctttaaaatggatagatccattatatatagttctatgtctgataaattttacgactagtatataaataatttacataatcaataactactcttaggcttttaaaaatattcagttaaaggttcttcaatgtcaggtgggtttttgtagagtccctctctcaatcttgatatttaagcattgcatagtggaatagaaagttaaggtttcagtgaggtattgttggaattagataatatggatattcacttgaaggtacattgaataaaactggcttgctgccagttaaacactatcttctaagtaataatgaagctggctgtttataacattacaaatattttacaaatcatgacgataatgtaattctggaaaaactcaactgaagagagtcatataagacagatgctgagatgaaagtatggaaacagtgttgatagagggaaaccacggacactgtctagaaatccagaacgttgtaaggtcatgggcctttattcatgtaggtggattttagagatcccctgaaatgattggttactaccagaaatcaatattaggggaagacggagagacctgaaaactctcacaactctgtttttgtttttgtttttccagtcgctgcatggaccatcatatgtaaaagtgggcttggcactaaaaagaaaggaaagaacagtgtgtccttctacaaacacaactctggaatttcccttttgagtactctctgacccttcctccttttcaccatctgccaagtggagtgtatgactttgtgtttccacattttctcctttcatcctctgaattctctacaaagttagagactgcagagaaacagaggggtgttcaaggagttagggagtttaggatgggatgcttagggataggcctgcagagttaagagactgccgtaggtaccctggtgtttgtttttctttacctgaagcatttgtagccaaggaagttatagtagagggattctgtcaattcacatctacttgcagttatatggcattctatagagaagcgcatgattttttattatagcatggctgccaagcaacaagctggttttctttcctacatctttggttttcagtttgctgacactccatcgaaggcacttaattttaatgccaaatacagaaacacaaaggacatgtgacaatggtaagagggtggggttgttgtgtcttatcgctattgtaggttgtggaatcttcttattaaaacttacattatacaaagtacaaaaacaaaaaaacaaggaacccacacaaaacaacccagaattaattctggtaaaaattcacaactatttctgatatgaggcaaatgttttataacattggttttaaatgatgttattacatgtgttaaagttatctagaaatagaaatttccttccattacccctctcacttgccccagaattataaaggaatggacattagaacattagaatctaaatttattaaattataatttgtttgatttctcaattttttaaatcagtttttgaagtttaatgaacattgttgtttagagaggcattacattattagagatgtgtcaggagataacagagatgttaaagttctttgccaccaaaggaagtgggaaagcaatgttactgtgtcattattcacatttgctaaggtacaaattcctttgttagaagtaggcagaagaaccgttctagaaatgatagttggacccaaccagagagtctcactgtttttatttaatatttgtgaaataaaaagactaaaaccatgaaattgaatcatttgtattggaaagtgaagtcttaatggattctggtttaactattgaattaatttttcaataatatataaaacatttcttatttaagtttgttcttttccaattttagagcaggtgggtggagcaattgaaggaaatttctatttctgaaggactttaataactataatgcagttgttttagcccagtgttataaagagcaataggatatagaaagatgagtaagaaggatagagaagtggtatctaggaccaagggtcattgcacagtttgtgagagtaataatctaatacatgtgaacacatgtgcgtacacacaatactttttttttttcgaactaagtatctacttctaaagatcactcatctagagtttaacttaagctcctttttgagcttccagctcacaaagcaaacttcatttgggttgtggattacttaactattttgctcaattcttattgagtcaattgataacacgtattttgtgttcctcctttttctcactatatggtctcctcatcactgaaaatgaagattgttgtgtccactgtatcctggcttgcttgttctgcgaattcctgaccctttgcaacattgtcctgggacaagcgtcatgtggcatctgcacctcagaagcctgctgctgttgctgtggtgacgagatgggggatgattgtaactgcccttgtgatatggactgtggcatcatggatgcctgttgtgaatcatcagactgcttggaaatctgtatggaatgctgtggaatttgttttccttcataaatatttatcttttgtttgtgttaaaactggagagtgtttaaaaatttccttttggggggaagaaaagcacattgtaagattctcatgaaacaacatggaatttgcactgttaactcattattgtaagtaatctctgaaagcctttttactttaaccaaatctacatggtttaatatgtgaaattttaactactttaactagttttataaatttcttaatatgttacaataacttagggacattttgacaccccccttcccaaatgttaaatgccttctcctttttaccgatatttctgtttcttttaaccgttctcaggagcactttgctccaaatatattatttttcagtgtgtatttaaacgaggcagtttattttgatatgtatctattcatgattgaaaggaagcagtcttggccaggcacggtggcttacacctgtaaccctggcattttgggaggccaaggtgggcagattgcctgagctcaggagttcgagaccagccagggcaacatggtgaaaccccatctctactaaaatacaaaaagttagctgggcttggcggtgtgcgcctgtagtcccagctactcaggaggctgaggcaggagaattgcttgaacccgagaggcggaagttgcagtgagccgagattgtgccactgaactccaacctgcactccagcctgggcaacagagcgagactccatctctaaataaataaataaataaataaataaataaataaataaataaacaaaccagtctttattttaaaagaaactttaggaaacaaacccacataatagttgggaaccagtgttgatctctctcccttaccttctccacttgttcaacagactctgaatgccgactgtgtggactctcttcctcagactgtggggacagatacaattccactcctgtccacaggaacatgagatttagcagactaaggagatctgtaaagaatgaaccataccacaaggcatactgaagtgaggattataagagaaataaactcaaaatgctgttggaatatgcagagaattgctaccagaatattcagtaaggtttcagggagaatgtggcatttgaggactctcttagaatgagtgattcacctgctatttaaatgaattatttagatttttgacaaagatttaggtggacaccctaaactgtgtgtgcctttaaccagttaaaagaacagtgccttcagcatacttttttattagttgtaggaatacagctttttgaaaaagctataaagtttaaattaactaaaaatatgcattttcttacacataatttaaatgttatcatacttttttgatgaaaacataatgccttagtaaaatagctctatttaataaagaagattgagtactctgacacatttcatttaaattaggaaatttttaatattaaaatcccagtgttctgagttattgaaaggctttcttttattttgagagctttaggtctttttgggatgagaacattttagttgtttagtttgtttcttaagcagtgctattttttgtaaacacagataaatggaaaccattcttttcaatgcagaagaaatctagatatcccctactgtgaccaaatttctgtattacgattttatgttaaattaaactaatatggcaggttataatgatccttaagtgtaaagaaatcagtcaattacaagagtaattgtatagttattgagacctatagtgtgtggcttagatgaaagggagagtaaattttcataccatgctctctcctactcagtttgatctctctaaaattgtagtttggtttgatttaatataattcttagtagaaattttgaaagtatgctttgggattaataattatttttaatttttctggctgaatatcaaattgatagtaacaacagaagcataattttaggaaggctttcgcaaacctagccttttaagagaggtttttaacctgaagcatgagaatatatcacctgtggtttttcctttgagatgaaacgtagtttctagttatatcattacttaaagggcttaaaaagaaaaaacttagcaaacttttgaatctttcttttattgctatttacacatacatacacacatacaaaacctttaaattttgggatctgaatataattctggtaaacagctgtcttcatttttctcctctaaagaacttaattcatttgttacataaaatataaggaaatctttatactattttacagtaaccacaatctaaatatttacatatacccaaaattaacttatgctcatatattaggatgtgagaatatcatctgtttatggacacatgaaacctcctaatgacctggaattgttagaatatttgactttttatatgcaaagtttttcaaccaagtggtttgtctaatatttaaacatgtactggcacaatttgtgatgaaaatattagcacatttgcaataatgtttctccataacagagaatgttaatggataccagaattttatttttgtatttatgttcatagtacttttcctcttgtctactccagacagttattccataaagcatttgtataattaaaaggaaaacagaaaaaggaaaagtaggcaaatgtgaaaatagtttcaatatatcttatgatttcttaatgtaaaatgttttgttgaagtatatggctatcatgactaagtgctagaatttatagttacaggcggtgtccttttaaatgtggaaaggcttttaaaatattttaaaactggacctgtattatcctgaatacactattttgaaaatttttaaaaatgacttctttattttgctttaccgtatgtttatatctaattgacatattgactaatgtttgaaagaattcaaccataagttaaaatctgaaggttatctttatcatgtttcatccctgtctgaagatttcctagtcttcttatgtaaatcacatgactcatgtccgtaaatgaactatgaaagatatcgatcagtttatgatcattgacatgtgatttcaaaacacagtgttcttttaaaaatctataatatgtcaaaatacaagttttttttttttacatcgttttagtaagttaatttcatttatttactttggagctatatttccacttagaaaaactaaggtaattttacaatatatgctgagattaaaaaccaaggtaaaaatgatcaaacatatatgaaattgagtcttagatttaatgaatttcactcgaaaataaatgatcagaagaatt

SEQ ID NO: 175 - DNA, 120864 bp, Homo sapiens
ggggagtgcggcgcggggacgggcgctgggcggccgcggagctccgggtgccgccgcgtccccagcgccccggccggcccctctgggcggcctgcgggggcggcgcagttgcgaaactgagtaagtattaactttacttagcggcggcgatccgggctgcgccggggaccccgcccgtcccgcctgcagcctcggagctgccctccgcccggttgcccctctctccgcaccttgggtacctcgtccgttccgcccccaccctgccccgccgcgggctcccgctccctctgcgttcacctttcctggtgtgtcaccctttgcgcctctcctcgcggcacacaagccgcggactgaaaagtacgagcttggtctttgcttttctgcttcctcccagtgtccttggcaagggagtttagaggccacttttcttgcaaagggaattttatgtctggtttttaaaatattttttcctccggatggaaatcggatgctcgcttgccgggtggcggtttggtgaacgcttttctcctctaaaaaaatattggtttataggtttttaaatttcatttgaactattaaccatctgcattctattctcctttgccgccagtccctttggggaggggagtccagaagaggggacgttcaaagtaattctgacttgcaaactagaaagtttgagagggtaaatcgcacaaagccggaagattcaacttgaagggacgcgagctttgaatgtgggtcctggtgcggcactgggttttaaaagatgagtacttgggttcggaatccagtgttgcgttgttattttagcatcatagagccgcctggtgttgctaaaccactactttcccagcctcaaatggcatcttgaacagtgcaacgtaggatatataattgcgggtcaatattgttgctgatctttagggatttagaagcgaaatgaatgcaaatcacgtctcatagctgacttaaacctgtcaggttagccctgtcaggttagcattaaagcatttcattaaaaaaaaaaatcctctagccctgtgacagcagggacgaacatttatggattttccagtagattgtggctcagcaattcattagatctgctttgtccccaggaagcattttaaaatatgtataaatctctgcttttctctccattagattaaccactcattctggtagggggccccaggtagtttttattttcttttttgcctttcatcttggagttgccaggagttgccatcatgttatgaaggaacagaaaatgagaagctttcttaatgggttttcgacatcctgtcctttgccagagtgaggcggtagtgaatgccagccagctttctgcagggagaggtgcagggtggacgcaaaaatcaggacgcaggagacagcactatcatttggggaagtggtttgtgtgagttttatcttttagcgggcatactaatggtacttttaattttatttatctctatgaggcacactccccaaaccataaaattacacatgaccatcccccacttgaagaagactgaacatagtttgatgattattctattcaaggatcaagtacaacaaaatataatttgtaatacagatgataaaacctttcaaaaatctcccccttcctcatttttttcctcaagagtctccaggtggtactttctgtgatggacacaattggcagtaatgcactgagttctttctaggtttattgatcaaatcttatgtctgggctttagtagcttaggggtgcattagagggccctgagagggagcaaatcatggggctgtgcaggcaggaaaggcacttcactttgcagaagtgtcagtgtgcttctggaaaaaacagttacaaagaacagagagtgtttaagttgtttataggatgcatgtttcctgaatttggcatttggttcagatatttggtaattacagatttaaaattcgacatggttgtataatttgttttgccttttatttatttttttaaggttgcaaccttttaacctgaatcttcagtgtttggctcttgtaggcttctatacgtggtgacttacgtcagtttttgacctgactgccttgtgttttgagaaatgattagttcttcagggtttctgactcattaattgatctgttttatgttgatgtatataatgacttggaagtaaaaatattgtttgccgtgggatattgttgtctttttcttatggttaattcctggcataatggctttgctcctttattataaaacattaagatcttagatatcttgctagtgttcaaaacattacaaaactctttgcaagtaaaagtggagtgggaatgggagttggatagaaaaacatgcatcataaattaaagatttggattacaaaataatataacgtttatttactcttctttgatgctaacttgctctaaccctaaatagacttaaaaattcaaagtgtagagagagtttccaagtattctgtatagtggaaagaatgtttaccccactgccagccagacttgggttgcacgtgtgactttgtcactcccgaggtgagtgagctcggccatgccacttcagcctctgtgatctacagttgcatttctggaaaatggggataccactacttaaagggatgctatggtgagtagaacatctaatatatattagatgtgcctggcacatttcagccaataaatgacaacatctcaaactccttcagaattgagctcttggtcactcaaactttcaaactgttccccctccatttttcatctcatccatccaaggagtagctcactccactctctcttttcttctatcagccctagcaaaccagtccatcataaagtcctgctgtccatttttattgcaaaatctctttcaaaccggtctgattttcagtccccactattctgccatcctaatgcaagccactgtactgtattatctttttccttggtgcggtgcctcctgcacacactctgcaccccttgcagtctgttttactaccagcagcctgaaaaaaaaaagaaaaagtatttgccgtcttaaagttgtcagggctctcaggaaacacatttatttatttttgggataagataccaaatccttgacattacttcaggatcctgcatgatttgatctctacatccacttgcatctcttgctgtcatcttggccagttctccagcagactagcctcaggcctgtggctcatgctgttggtctccctattttaggatcatctccttgagtaacttatcatccttgggtgctagctcaaatgtcctttctcataaaggtcttctctgacaagcccacccttatcgtcatgcgaattaaatgtcctttattttctccctcatagcgtaatcacttttgcttctgaatatttaccacaatttatatattatttaatcacttagggtccttttcttgccctttaggttaatatgaagttgataatacctggtttaatcaccagtgcccagtatatgtagtaggtgctcaataaatatgttgatataatgagtaagatcgtaatatcagtttgtatctttatcttttttttttgaaatggagtcttactatgttgcccagttggtcttaaactcctggcctcaagtgatcctcctgcctcagcctcctgagtagctgggactacaggtgtgtgccaccatgcctggcttctgtatttgtatcttgattgccttctttatcactgttaaatttgcttttcatgatagaaaagccagacccacacttttctatattccttctttgctggttatatgtataatatgaaacggcctttgcaaatatcaggtaaaaatgcatgtaggttctgtgaaatattcgtagtaataaattgagacaccttttaattagtgttacccttgtgactttctgttgtacataatcctttttctaaatacatcattaaaataattatttttttatcagcataagcttactgaaaggaaaaaaaatcttactgtgccttactattttacagagcgtcacatgataacacgttagtcagctgctgtcggctggtggtgccagacatcaaaggaagattgggaaaactttagtagaaaaacaagacctagagttctaaggatgctcagtgctgtccagctgttgatgtgacttgcatggtaaccagacatcactggaccatacacttaagagagaggaggagttttttttaaaaaaagtgggagccacctagaagtctggaagttcttttcttctctctcactaaagcattccttgttttagccaaaaaaaaaaaaaaaaaaaaaagtctcatgaccttccaaggccaaggaaggcttacagctttgagtatttttgtcatgtggttgctctttacgaaatattagcttgatgtcctctaactctgaagtacttatgtctgttattgatgtttgtaatctctacttcttacataattctgcatttttctcttgacttgttttttaggactttagtattccttaaaaatcatttcctcacacccttagagtgtagttctagttctttctagttttgtatcttatagatcactgagtgtgtgggggcactttggagctgattcaagtccttcagaacgtactcctctgcagtccacctcgggggttcccaaactgtgatcctttgagtggtctggaccctgaggtttccgtagcctgggtgctcttgggttgggagagcaaggaggatgaaagcagcatttttgagcccctgttgggtgctctcgaagaggaggagtgagtagtttatctggtcagaattggaaaagtgaagcttaggctttctttccatatatttgcttcacaaaagaaaattgttccttttgttcctacatttccccactcctgattttctagtcaggaaggcatgagaagagagagatgcccctgcaagccagacccttaccctggtgcttatttagacctgattttaaaaatgttgagagcaagccctgagaggggcacaccaggtgatttgcctcgtgtaggccctctgtgcctgcaggacattcgcatcacgagtagctgccactgtggaggagaggaaagttatggttgggaacccttgttattttttttccaccatgtatatatgtccactggttacttgggtgaccttgaacaagttgccttgagctttttaacaccaataatatttattacccatttatttcacagacttgctataggatttagaaagctattcttagcaagtgtttttttttttttttaaatcacattcagatatatcacaaaatattgcagtgaactgtagggctgtccaaattttatgtatgcagcaaaatattttcttactcattagcatatgttttactctttgttttaaaaagaaatcagatgtaaatgcaggttataacaagaggagagctgtgatggtttgctaccaggttttatgtaggtaatatattttgtcactgttgttatatttggtcactgttgttagctatcattggctcgtgagtgctaaatcatgtttatccttatagtaattttactattggaaaatcgcttaagactaaattattcttccagatacaagtatatatgtttaaaagaaattgggattctctttaatggatagatattgggcagaaagtaaggttttacccttatttttgcttaaaatatttgagtggatttataatcgatgaaactctactgtaaaaataccagtgagaaatagggatgttttgtaatgttgaaggtaaaatttgttcatttctatgggaagttctaatacgttaaatgtcagaatatcttatagtagtttatttgtgctgtattttttctttttagtgtataatgacttcccttatatttctttttttaaacagctttatttaattaattaatttatatattttttgagacggagtcttgctctgtcgtccaggctggagtgcagtggcacgatcttggctcactgcaagctccgcctcccgggttcatgccattctcccgcctcagcctcctgagtagctgggactacaggtccccgccaccacgcccagctaattttttacatttttattagagacaggatttaccatgttagccaggatggtcttgatttcctgacctcgtgatccgcctgcctcggcctcccaaagtgctgggattacaggcatgagccaccgtgcccagccttaaacagctttattgagatatcattgacacacaataaactgcacatacctaactgtacaattttacaagatttgatctatgtatacacatgaaatcattcccacatcactttcccaaatttcttttttttttttttttttttgagacagggtcttgctctgttgcccaggctggagtacagtggcatgatcttggctcactcaaccactgcctcctaggttcagtcaattctgcctcagcttcccgagtagctgggactacaggcttgtgccaccatggctggctaagttatgtatttttagtagagactgggttttgccatgttggccaggcttatctctccacctcaaatgatccgcccaccttagcctcccaaagtactgggattacaggcgagagccaccatgcccaccccaaattttctcattctcctttgtaatttatcttcctttcattctcccgtttcctctaaaccactggtctgctgtcactatagagtagttcaaattttctggaattttagattaatggaattatgcagtaatatacttttttttgttgttgaggcttcttaaactcagaataatggtttggagattcattcatgttgatttatgtagtagtagtttattcctcttcattgctgagtagtatttcattgtgtgagtacacagcaattcatttatctacctattgatgaacattagatttgttgctaatttttggctattacaaataaagctgttatgaatacttgcatacaagtattgtatagacatatactttcatttatcttgggtaagtacccaggagtggaatggctggatcttatggtaggtgtatgcttagctttttaagaaactgccaaactgttttcccaagtgattgtaccattttacattcttaaccaccagcaggtaaacatgctgtttcctttgcatccttgtcaacacttggcatagttggtcttttttagacatttgtggtattttattgtgggtttttaaaatttttatttttttaattttaaagacagggtcttgctctgttgccgaggctggagtacagtagtacagtcatagttcccaagtagctaggaccacacacatgtgccaccatgcccggctgttttttaaaatattttattttgtagagatgaggtcttgctatgttgcccaggctggtcttgaactcctggcctcaagcagtcctcccaccttggcctcccggtgttgagatcacaggcatgagccatgtgtccagccatcattgtggttttaatttgcatttccctaacaactagtgatgtaaagaatcttttcatgtgttttttatgctatctttgtatcttctttggtgaagtgtcctagtcttttgctgatgtttttattgggttgttttcttattattaaattttgagaattcttatatattttgaatacaagtgtttcatcaaatatatgctttgcaaagaatttctcccagtttgtgtctcatcgttttcttaacagtgacttttgaaaagcagaaggttttaattttgatgaggttcaacttataaatttgttttttatagattgggcttttggtgtggtatttaagaaatctttgcctagcctaaggtcataaagattttctcctatgttttcttctagaagttttatgttttagatttagatctgtgatgcattttgtatttcttacatggtgtgagttatggatggaagttaattttctgcatatggaaattcagttgttccaacactgttgaaacgactattctttctccattgaattgcctttgcacccttgtcaaaaatcagttgtctgttatatccttttttattgtatcagttgatatacacatggtattacacagtattgttaattatcacagctggatgaccaactaaatgaaaagcagctatctccaagccagtacttgataatgtgtttttgtcacgtttaatcacatttctagtttccttacaatagcctttgtggaaggctttcctactcagacattccttctccctcttttcctttctttttttgttatttgctctctgttataataataaagtctggtgatgagggtacatacataccttatcccttttaactaatctcaaatacactttttaaaaaatgtttcctattgataattatattacttttctttgaaaacctcccaacctagatcattcacttaattttaatttttctattcttgattatgtgtttcttcccctgttgtattctgctgagtaatggcatgattggaaagagtgcccacttaagttaaagcctggctacacaggtgtagccttgaagaagttgtgagccttatcgagcctcaagtttctaatgtctaaatggggccactgattcttcactctgggttgttttgaaataaaggagatgtttatgtatgtccacatacagaaacaaatggatatgaagtacctcagtggagagttagtgccttccccttacccaactccatgaactctgaataatcattttgtttgaactgggaggcaggacaggcctctgctctctggggaggacaggcactgacccctctgcagtctatccaggcaagtagctctgaagagaactggagttagagacaaccctgtctgttcaagtcatgcaaggatgggagaagagctcctcaccatgcacaccctggatcccgctgtcttcggggcccttctctatcagtaatccatcctctctcccgaattcagtctcgcctttccttgactttttgctttgggcctggaaacaatatgtcaagtccattgaccctggtgctgcttctagctgtctcctttctcagccagcttcttacaggggttgtctgtgcttattgcttctactacttcacctgccaactcactccccagccaggtaccatttcttagaaacgtttcatgccacaggcatccatatcttaattgcctaaaccagtggaaacttttcagccctaatataactgaagttgtttgcagcatgtttacactgttgggctgtctccctccatcttgaaacgttgcttccttggcatcactctttctttgttctttattttttatttatttatttatttttttgagacagagtctcgctctgtcgcccaggctggagtgcagtggcacgatctcggctcactgcagcccccgcctcccgggctcaaccaattctcctgcctcagcctcccgagtagctgggattataggcatgtaccaccacacccagctaatttttgtatttttagtagagatgggggttttaccatgttggccaggctggtctgaaactcctgacctcaggtaatccacccgcctcagcctcccaaagtgctgggattacaggcatgagccatcgcacccagcctgtttgttcatccttttagttgttcattcaaagccaaactgcatgcccctccatgaatgaggatatagcagagagtaaaacacacaaagctcctgtttgcatggagagcacactgtactagggggagagagataataaatgaacaaatattttcactttatttatttggtgataaatgctttagagaaaaaaataaggtggggggattgaaaatgctaggggtgggagtagaggtgttatttgatattggatggataggaagcccttgctaatgtaagcacatttgagtagagaccttaatgaaatgaaggagccagctctctggctgcctacaggaagaacgctccagatagagggcacagtgcagaggccctggagccagtgctcacatgtgtacccacatcccagccaccatgcgggtaaggctggggggagcaaagggctggagatgaggcagaggaggtagtgggggtccctataccttaggccttattggctatgacaaggatcttggttttgactctgagtgagaagacagttgagagtcttgaatagaggaatgaataaactggactgcagcctgagtagcaggcaggagcacagactccggagctggctactgcggtaaaaacccaaccgtctgcctgctggctgtaggaccatggattagttccataacttctctgtgccttatcggtaaaatggagatagtaatgatacctgtctcacagtgtcgtaaggattagaagagttaatatttgtgaagaacagagcatggcagatagtattataaaagtgtttgttaaatagaattagtaaaattgaaaaggttcactctgctgttatatggaaagtgtttgccaaggggaagtaaggctagaagtagaaagaccagttaggagataattgcaacaatccgtgcaagggatggcttagatgaggtgctgatggtggaggtggggaagtgaggagaagggtcacatcctgggtatattttggcggggtggctggaggattggatctgcttttctttccatcctggaactttccaagttttctttgctgccttgtctgctccctcttgaacaggggttctccagtggggtggtgccattccggaatatgtgggtgcatgttttggttgttgcagactggagagatgggtatttctggtatttagtggccaggggctgggccaggggtactcagcatcctatctggtgaagacttgttccttgaaatgtgccagtggcatcctggatgagaaatgctgctttagacctttatttccccgacccccactcacctcccgtctctgctcgctcacctgcctcctcaagatttcttaacctatagtccctgtgtgggcagcagggaagcccacgagctccctgatattttttctcaaaatgttcatgtgcttttaaactctctttcttcctgtacgaccccacttttttttttttttggtgagaggttgcagaatttttcatcaagttctgaaaggagttcacatcctaagaatgtaagaatttctgttatgagtgatctcacccgtcacccaccttcattgtttttactccaacctttatggtgctgaatgtccggatctgtgctcctgcagtgctctgtgccctgatttctgggcccctgcccactgaactatgtgtcagtttctcgggatcagtgtgtcacctaacttcctccttaatttcctgccgggatttgtgggaccattatccatcttactcttaatattgtctttcctatgccacctcaccttgagtaattcatctagttctgattttacctcctggacagctgaggaaattttctccatcttccatcattcactatcctaatttatcatctctcatttagattgtttcctcttaactggtctccccgcctgaaacccatcctccatgttgccggatgagctcttggacacagaaatctcactgtgtcactgacctgctaaaagcccaaccctcagtgcccacaggattgagttcagactgttacgatacacaggacctcggacatctggctctggtctcacaccctgggctggtcagatggctgtcctgccttactgcttgtctgccctcccatcccttgactgttctcaggcactgggcaccaggtgccaacaggactacattaataagacttcccatgcattgatgctgaaacatctgaacatgctatttgatgacatgaagaaatggttcatcctcttttttgcctgccagaacacttgacggtattaaaaccagcctggctgtccctttctcttgaaggaggatctcactcccttaggaggtgatcgtgccttccttctatatcatatgcatacatagttcttattcctttgctgtaattttagaagccctctactttaaacaactaagcttctgagaggctcttcttaagctcatttcttcacgagtttcaagtgactaagaggtctttaagcttgtagccctcgatgcagttcaaggaatgcaagttggttctttgaagcattataactgattatgtccttgctgctggatgttctagggttatctttttctaaaatggagcagctttgtctgcattaaaactctctggaaacacatggcttcttaatgattttcgtggggccctggggagcccctcagtagcccttgatctccaagttcactccttacctcttgaattgtaaggagccttggttatgcacagcctttctgttgtggaacaattttttggcctcctgaactaacattgggccaagttcccacctttggcactgatcatcctgttgcatattcagaatggaaaaacttctgatgatctctcttctgtgttctggtcggtcattaatgcttgtacttcatcctttgccctccaggagtcttcctagttttcatttcatatggaaaaaaaagaaaaaaaaagaagaagaaaagtattttttcaccactctcaactgtttccaatgagctttctttttgtttctgttatgatgtgtgtctctttttattagcgcttaaaaaatgtactgtgcttttgcattggcagatgcaatggcattagtaatgtttgtaaaacacttaaaaatgtattgtagatacagcagacacattcatccacagactaacaaacatgaaagtaaccacccaggagaagttttcagagtttggctctggaactggtatttgttgccatctgagcacttgtgatttcaatcacgagagtgagaagtccagattggtttagtattgctttccctgctagactttgggtctcctggaaagcaggatccatatttagttatccactgactctttaatggcaggcacttgtctgactcttactgattcccactggatccttgggcccagcacagctagtcgttgagtgaatttataccctaaaacaggaccatgccaaactgccggtagacactaagtgtgaagaccaaacgaataatttgaaatataactgacttaatcattcatattacatggatgacttaggtgatactgaaatctagattaataggagtggaagttttacttggcttctgaaaacacttcaacaaatagtaagtactgaccatattcaggagactgacataaggttatgaggaagaatgaagtggtctttgatttggggaagtttattatcaaccattgaggatacagtaagtacataaatattatataagctataatatgtaatattataaatatataaagctgagtaagaggagagagtggctaaaaaactaaaagagtaagggcatttactccagcagtatttatagtaataaacattagaaacatctaatggttaatatcagggcactggttaagtaaattattgtataggctccagatgaactgttatacagccattaaaagtatttatgaagaatttacagtactttgggtaaatccttttctttttataaggttaaaatgagagaatacaagattgtacacagaaggtgataagaatttttgtattttttaaaaacagtaataccaaaaggaaaaaacaccagaatgaagacataccaaaatattaacataattttttgacttcaagtatgttatgtctgtgtgtacatgtatatgcacatgcatatgcagtttattggattttcatacactgaacaaatccatgcatcaagtgcacagatcgagaatacagcattatcagcatctccataggccctgtgttcctcacttctaatggcatctcatagttttgactgttttttttccttgtataaatgaaatcatacaacatgtactctttggtgtcttggtttctggcacccaaggctgtgtgattcattcatattgcgtataactgtagcttgttcattcttttttttatggatgactttttttgttttgagacagggtctcactctgttgtccaggctggagtgcattggcaagatcatagcccactgcatgcttgaactcctgggttcaagtgatcctccctcctcagtctccccagaataagcaaatattctgtaatcataaaaagatcgctattttttttttttttagaagcaaaggctagtttatttgttaaaatgcttgggtaggttcatttggccagtttggctagactgtgggacatatgaaggggaattgagaagataaattggcactgtactgaaacagatgtggtgcatgcagtgtgaactgagggttaggataaccaggttctgtttgtcacttagtagtcatgggaccatggacacatcatttaatccctttgatcctcagtttgctcatcatccatccgtcagctggatgtgatggtatctatcttccttataaactgaccatgaggcttaacttgagatgctgagtttgtgagacagactgccagacagtgaggtccttcatttaaaaattagggagcctgctatggtctgaatgtttgtgtctccctcaagtccatatgttgacatcctaacctccaaggtgatggcatttggaggtggggcctttggaaggtgattagctcgtggaggtggagctttcatgaatgggattagtgcccttataaaagagaactatctgttcccttctaccatgtgaggacacagcaagaaggtgccatccgtgaaccaaaaagtgagcccttgccagacacctgatccgctggtgccataatcatgaacttcccagtctccagaactgtgagaaatacaagtttctgttattggtaagctacccagtttatagtattttgttaaagcagcccaaatggagtaagaacccgtgtccggctgctgtaaatttctctatgaagtgagggatgagagaagggtgttattaggaagtgaaaacagatggctttgaggttgcagtttgagcaaaacagagaagtttggggcaagtgttggctaaggtctcagtgagctcggtggtccagggagaaagcagcggggctcagcagtgttgaggcccccactgaggttggagcaatgtaaatggagtgtaatttttttcccctagaagatttatttattattgttttattttggctaatattaaactgatttttcctgatcatacaagcggaggaggtgaaagaaagaagagggagggaggtggaaagcccagccaatacgcgagaagtgccacagctaatctgcaaagagaatggagattctgtttaaaggaaacctctgattttaaatgtgagcaatgtggaagtccacattgaattggaacatgtttttccaaaggtatttatcctacaagggatggctaggttttttgtttaatccatgagagtctacaaaacagacagggacttttactaaaataccttttttttttttttttaagccatagcactatactagcagacacagagcaatactctaagcccaagttagttctaaagcaatcccagcatttcctaatgtagaatctgaataagtagaaatcttaattttcctcaatacagctttaactattttagatttttcaaattgaatagggcttgatgtaccagcttgcaaacctatacatttatggtagtattgtttctatgggaatattgctcaggtaggtgaaaagtgttggggctgcactctgagtttgtctgcctcttccagacatattgaccagtgagcactcaaccctgaatgtagcgtgggtagggtagctattggtagataattgatgtcggtggattgggtggtgcctttattcatcagtgattcattcattcaatatctgtggagtgtttgcaagctggctatgcaaaaacaataagaaccaatcttatctttgagacactttgttaaaagaggggcctttaaacaaataatttgtgaagtgtgataatggataaaatagagatgtgggttcccagggtggggttgggagtgagtgcttctggaaagatcttcctaagtccacctgaggaaatcagggaatgttaaagaggaaagttcagtttgagctaagacttgaggatgaaaggcattttttctgggaggacactccatacaaacaggacaacaggtccaaaagcacaggatataagggagaatgtggtctgccggagaacaaatagtctcgatatcattaaagttagatgtgcacagtgggctgggggagtggctggagctgaggttaggaatacttacccaccccaccagggtaaaggatgttcatgctgtactagagtttgtttagctttcagttggtagcaagcttggttatgagaagcagcttttccggtctttgtcctgaattaagattttgacatattcagattttagattagagaatgttgggattgctttagaataacctgggttcagcatactgctcagtgtcttccagtgtagtgtattgagattgctgtgtttatattcactctacaaagatttatgtgaattaagttaaaggaacaatacttgtagtggttgatgttacaaagataagaaatggcctctgccttttaaaaagcttgcaatctagcaaagcaaaagttgaactttaagaagacttattttagaaatagagataaatgcaaaggaaagaggagaaacagaggaagctatttagaaggtagtacacgctgatcaaggaccaaaggaccagaagaaataatacctggggacagtggcataaaggtggatgagaggtgatggggtgccctagggagaggccaccacagccagaaaactgtggtggtggctgaccctggagcatggatgtacagagtacctttgggaagcagcacagtgtctagactcagtcagcttgggatgagactagacagaaatggggcccataatgtgattggaaccaggtgtagaggagccgcacccagaaattttggaccttattccaagccagtaggcttttatgaacaggtctcctggtctcctctcctcacccaggctgccagtgaggcaggagaatagggtctggaggcagggaacctaaggctgtttcatgccaacttcctagaactaaattgaaaggaaaacccatcagatcgacttcctaggactaaattgaaaggaaaactgtaaccctccgcttaaggaacaagaggaccagaggctactccatttgaccttttctgtctggaggatgggaaattggctgtctgcaacaaatcatactgagtgcaggtggagtcttcatttgcaactttgtaacttcattccagcctcagagtggttgctgtccacaccagcggagtcttggtttgcacagaagtataactttgtaacttcaccttagcctctgattggttgcttcttcttttgcatgtgacatttgtaacttcacttcagcctctggttggcagctttctgcaacgaatcagactgattgtgggctaccacttcggttacatgagatgagcctgaagtggccaatgggaaacttctagtgggtatttggacccaagaagattcagtatctgggccattgagctgctgcttgggtctgctcccacactgtggagtgtactttcgttttcagtaaatccctgccttcgttcttttgtgctttattctttctttgctttgctgggcgttttgtccagttcttttttcaaaatgccaagaacctggacaacttggagtcacgaccctctaccggtgacatgactttctccagcctctcttccccctgctgcgttaagaacaagcccagtgtgttactcccaaagcctaacaccacatgcttgggacctcctggttttgcacgaaagttgtgaatttagcctataattctaagacgtttccctggtccacagtttatcccctcattgttggttctcctcaccttagatttttacagagcacaatgtagtctttcagccacttttgtatccattatctaatttgattattaacagtcattggaaataatcaggtctggcaatttataggtaggaaaattaagctcagaaagcctaagcgaatagctgcagatgagattagcaacattgtcattatgaccctgtttgtttcaggcttccttccattaagtcattacaccacagccttccacctgactgattctgacttattaccagtgaatgcacgccagccacgtcgttatggcatcactgagaagtttgcatggattcatccttgttgggctgtgacttaagtattttgaaatggctgagattatgggctataaccgtgaccattacacagagagaaactaactggcttatatggtagtttgcccataaccatcttattcatttttcttctatttaaggaacaacccaacttcctactaagtctctttcatttatatgattattttgattttttttttctggaaataacccagatcattgcagttcttgttcttgacctcatgtatttaacaggaaaattgttttccatttttcagatattcagcaagctaacagagttaagtgtaactaatttagtgaatttagttggcaatatgatttgccaactttagtatacaagttaaaatatttgtaaggcaaaaaaaaaaaataagaatcttgctttacaagtatactttgattttgccaacagttaccaagttggccttttaaaaattaccattgagaacaacacggttgtaaggcagctacagtaagggcaaagataactagtttttatcattaaggaccactgacaccaaacagtctgtggaattcctagtgacaggtgggattgacactgagagacacttggaaggtcattgtaccatctttcaaaagagcagtcactgaagagtagaagtggaaaatcatagttagtggtaaaatggggcatagggcttgtgacactcctcttttcaaatcctcagtggctgcctgttgctgagagggtcactccttggcctggcccttctacccacttgcttatctgtgctgagcgaatgcactttgatggcattttattaatgacagtggattcagtcctgtcgtggaaacaaagatgaactcttctaacacaattttttaaaaaaccatacagtacattctagctgagtatgtagaagcttctgagattctgatgcagaaagccgatctggaacactgtttaattcaggtcaaatcaagttatttttaagcgcctaaatgactaggactgggcctaaatataacatccttatatattctggaagtgagactggccagctgcgtctaagaagagcacctgcagtggcagtcacaaaccgccacattccctcattcctatctttattaatttttgatattgtgttaattatatatgtactacatataaatatgttaataagtattgcttatctcatttccagtccagagtgttttagatgttagacagaagcatgtgcttgtgcaccttataagcaacaaaatagtttttgccaaactaggtccttagaggcaggagcagtttcttattagaactctttgggactcagggctttattcagcatgggaggcactcattaaatatatgctagtaaatagattgtattcaaatgtgtacatgtaggttaattttttttttttttaaccaggggcacgatgggatcagatcattataggctggtcattctggtggcattatttatgaggtgcctatttccctgcctctccagcaacactggaagctgagagaccagaaggtagcacagtaataaaaatgagagcatgaaaaccttaatgaaaggatttcattatggtaatagggaagagaggatgtttcttgcccactattggatgttagaataggtaggatttaatagctaatagaataccagatctggagagacagcagtcacagtacttcatgctagttaaatgtagcacatttgagggagtagaaaaagatacggtagtatgttcacttctagatggatattacctagaaggcagtaagaaataaagattagaagctcaaaaagaagcttgggctggaaatagtgatattcccaatcattcttccaatcacttattcgacatgatgagtcctaagacagattggacacgttggtagttgaagaccaactagtagataagcttgtcctgcaccaggcagtataaagagagaatcaagcagcagggagctctagcagctggccccaggcaagaagagaagctgagagagagaaaatgagatcagtgccctccctagaaacaaaggggaaaagagcctcaagaacaaagagttggccagcagtatcaaagctgagatggaaatcgtgtagataagggcttgatttttggcaacgaggaaatcattgaggattttctgaagaacagtgaggttagcactgagttgaggattgtgaagaattggagacttaaaaaaaaaagataatttataatctatatttgagtgtgatgtgctaggtcccaagcacttcacatgtattaacttatttaaatctcacaataaccccatgaaagtctgtgcttttttattccccattttacttctgcaaaaactgagacagaataatttgcccaaactcacataggtaagaagtggagcagagctaggattcgaggccaagggcagctccaccattattggttttaactaacattccatgctgatgcttcactgtagaggagagaggttgagtacccatgttcctgttggtgctgtgtaagtgttggggaaacagagacaatacccttgagcaatttttactagcagtaggggagctggatcagcagcacagggagtgtttcagttgctggagcgggtgaaggatgtagcaggtagggaaggcagctgccagcttttactgttggaagaggaagggaggcatcaggaaaggtttcttggaaaaggtgactcttaaatagaggttcacagtgacaaaattcagagtggtagttacgaaaatttaggcatgagaaactagctcctatccttaaggactacttccttctgctttcatcaggttttctaagtaccgacctccatggttaaaaaccaatttaagcaaatataccttgtctttaagtctccagtgggtttatcttaacagggtacttaacccacaaacgagaactttctgttgttgttctttggctaggtgggccattatactgtaatactcataatttgattgtatatttgctttagagttgggtaatatgactctttccgtaatctattctaagataaatgccatatatacaacaaaatggtcattatctttaattttaaaaagagattaaagagtaaatgcagtaactgctatgttttctgcatggggtaggaaagacccttcctccgtaatcatttctgtgccttcaccaaacactggaattccagagactgcgtcttccaaacagggtttgatttttttcggggattgagatttttggggatgatttccattttttaaaagcatcaaaacactatgttggccaaacaaaacacttatggaagctggatttgtgctttacagttgtatcagtatcttcccgttagctggtgggagtggggtgggggtagtactaagttctaagtcctatgagaagggatttcagccagctatgagcaggtgaagccatagaagggatgtggatatcagaaaggctgttgagagagtcattgcaagaataatttaaaaatcactctaattaaaaaaaattcatggaatgagatatttcaattcagtaattgttttagataagtttcttaaacactttcctcttaagaaaaagtatatcatcctgtctcctttaacaaaacatattttgggggattgaggggcattattagcatattatcctgaaactatggttgttgtccagtagaaaataggcaatgggtgggtactttttatgggcagtataaggagatactgaggcagttgctttattaaaagagggaagtgtatgatcagggtcggatgcgtcctggtttgctggattggtcctggctcactcctgttgttctggcataataacaggacctttcattctggatgattgttttgttgaacccctttgactccaccagggatggtaccaggttcctgaggccaaagaagggacccagagccaggaaacgagatgacgtggggttttattgggggcctatatccagggaagagagtctagtggcagtgggctgggcaggagaaccagccccaaaagcatgcagtttatatagcattttcacttagtgtccccctgctcaacagtctccatatggtaaccttccctcaacccaaaactaagggccatgatcctctgtctggcctgcattccaccagacctcagaggttgtgcagttgggggttctgatgttcctcgtagacaaagaacgaatctcctggttggcaactccaggattccctaacttggaatattcaggtgcttctgccatacagggttattctcagggtatgcttaagttattgctatcagatgcatttaccatgcactgataaattgtatggtcaccctgcataatgttaatatgatttgtagttgctggtccctttctcatagaggtggaatgaggcaggtatgctgaatgaccttgctgtttcttgtaaaattaatcaccaaagcaaaggctaaaccttagaatgactctcagccttccctgaatgatctttactgttgctgtcagggctttaacttgtcagcactatcgaaagcatgattgattatttctgtattacagcgttcaaagccatcctccctgttaactttaacctgctcttaggtctatatcaaatttaatttgtggtgtgtgagggaggtataggaatccctatttcaaggatatgtttcttaataatcgtcctcaaatgatactgaagtagagataatataacatgaatttttaaaaagcacgttttcagacaaacgtttttggggtatgaaatcgaagatacggggtaccactttgcaggtggatctttttttttagaaacttaaagtgatttatatgctgaatgatacagtgttccacatctttttcaacttagaataaaatatagaaggcatgttaatcaagtttgtgaatgaaaaagtttgaagttgtaaataatatttttaaatgagagattgagaattctttaatagcttaaaacaatgactaaaatatagactaagttgaataggtcagaatatgaatttctgcatttagattacaaatagtagttatgcaagtgcagaaataaggaaacaacatagttcatatgaaaaagacataatggttttagttgaacagaagctcagtataatggctgtttagaatgtcagtgtactttggtttctgatggcatgtgagactagatactctgaattactcctctagtaaaaatgaatataaataaaaatgctggataaattatgtaagatgtatccctaaatggcaagaaaacatgaaaataaaagaccaaacattggcctgaaagtgaaagcaagaaatcagagagataaggggaacacctggttagagagcacttgctgagtcccgttgagcttgaattttcttggtcccttgttgcactggagacaagagacaaagcccagagcctcctatggggaaaaaagtttagtagacaatgtctccacatagagctgggacccctaaagactactttcatagtgtattgtagaactagaaatataacttcctttgaccacctcccagtccgcagaaaatctcagaaaaactgcctaatattttataaccaataataatcagcattcatggaggttttcagttctaatttagacctataggtggtccaaagaaaaggcaaattatatagttgtagagtggttccaccatagtagcacaaggcagaagctagtgcaggtcctttttggaggaatctttcttcagggcaagccttgaagagtttaaaaagttttaagaaattttaatgacagtcaggaatcacaaaacaaagtaaacaaggcatcatcgatagaaccagccaaaatagtagataacagaattaggtgtgtaataatctcagatattatagttgtcagaaagaatgtaaaataacttttaaagaaatggaaaggttaaaaatatgagtaaattgcaagtgaatataaaaatgacaaaaaaaatctgaaactaaatagttctttgagaaataaacatataattggaatttaaaaaccagcaaataggtttaatggcaaactagacatagccagagcaagaattaagcaactggaagatagttctgagctttttgactgtgacccacagaaagaaattcacttactgacacatgtgtatgcatatgatacatgtgtatgatttaagccaaagtatctagaaactgatcttatcagttctctactaaaggtaatgttctctactattggcttttctcatttattctttttcattaaaaatgttgggaccaacccaggaaattttataaactgcaatgggttacgaccatagtttcgaaggaaactgattttaataaaattgaatatgtgtataccctacaacccagcacatgtccagcatagttcagagcactttgtgtggtaccaaaaaaagaaaaaaaacaaaaaagctggagaaaaaacatggattgtagaaagcataaggcattttttatctgtacagtggattaccgtaggacaggggtgatactaaaaatagtgaacaaccagtacagtgtagacaccatgcagtcagtgtggctgctgcccataaacagcgagcctcaacccatacccgtgtgtgccagcctgttgacagccctttctgtacctttgaaaatgaatgaactaccagttcgtgcatcaacaacagaaaaacaagttctaaaagattttatgtagtatgattccattcatatgagcttcagaaatttgcacaaaactgaagtagtacattgtttaaggatacaatcatgtatttatttatttatttctggagatagggtctggcccagtcaccaaggctggagtgcagtcgcatgattatagctcactcaccctctaactcttggactcgagcaatcctcctgcctcagcctcctcagtagctgggactacagatgtgcactgctacacgtagcttttttttttttttttttttttttttagttcttttgtagagatggggtcttgttatgttgcccagactgacctcaaacccctgggctcaagccatcctcctgcttcagccttccaaagtggtgggattacaggtgtgagatggagttctgctctgtcacccaggctgcagtatagtggcacgatctcggctcactgcaacctcttcctccccggttcaggcaattctctggcctcagcctcctgagtagctggtactacaggcgcacaccgctatgcccagttaatttttgcatttttagtagatacagggtttcaccatgttggccaggatggtctcgacctcttgacctcatgatctgccaaccttggcctcccaaagtgttgggactacaggcgtgagccactgcacccagcctaaactattttttaaaaggcaagggtacacacaaaattaaggagaattgttgttaccttttagtggaggacaagaggttggattaagaagggtcacaaaaggagcttcaaggtaactttttcttcttaaaattgtgagtgcatgaatgtttccttttgtttataccttactcattttatgagtactcttttgcctgttcaacatttagtaaaattaattttaaaaagtcaaggcaggattaacacaggcaataaatcatttatgctgatcagaccatttttggaaagttgtttttagttttgggtgccaaattttatggacattaacaaactgaaatgtgtccagaggaaagcatccagggtggtgatataaaccaccaccctggtcttgagcctttcatttttcagatgcagattcacacgcattctcattattggtggttttgactcccctggattggcctgctagtgcttaatgcaaaccttttgttaactcccaggttattgcactttttgccgcaccaatcagaaatgagttccaagaagttccacaaatgttctgtagtgtgatggtttgctaaaggttttttgtgtgtgtgtgggagggaggcatctaatgctgtaactatagaccctatgtcatgttgttactgtattataccaaattatagctcaaacaagggatctttcattgctgggatcagacaaaccctctgctgtccacagctcctgaaggcatcactagattcaggtagtatccaccgaagggaaatacataaggataatttagtttggtgcctttcagagactatcgtatggttttctgtctatggcagtgcaggggtccagttcatctggccagggccttagctctgtgtaaacaaggaggggtaggcagatggcagcatttgtctggataataattacttgaggtaaatgagtaaatcggcaattatcgaggatctgcaatgtggcaagtgttgttaggtgttttctcataaaaatattccacttcatagggaaggaagtggtcttatccccatcttacagatgtggaatttagggaggggtcgccaaaattaatatttgggggagagaaaaaggggaggagagcatgctttcagcagtgcagtgctagggctgtggagtcctggctaaaggcagtgtgtggtgtggttaggagcacagattgcagcagacagggctggattcgtatgctgactgtcatttactagcagggacacctgggacatatgttctttaactacctgtgcctctcgtatcatcagaaaacaaggaaaacccctatttcatgagattgttaagataattaaatgaattaacatacataaagtactttgaacagtggcttggcccacagggctataaaagtgaagtgtttggtgaagtttttttctatgctggcttgtagcaagtgattctcttggtctcagtgaccctgtagcagagtctgtcctcagtcttaaaggggtgagatttttatatccagtcgagcttcccagcatcccaagttgggttcagatgtacccagaggataggtgtggccttgatttacattaattagatcttcttcctccaggctcctgcacttcacagggctatagaaacctgccagtgacaatttttaaaagacacaccaggtgtacttattcccaagaacttgctctgcagatgaggaaactgaagctcagggaggttataactgtcccaagttcacatgacagcagagctaatattagaatgtttgctgttatctgtgttacctctagaatgtacagaggagaagggcagttttctctttgaagccttaatttcatacaaggtggatgacctcacatatcttggtccactggactatcaggacttgtaggttctctgtgcccttttgaggcctatgatgtgcaggctgctcccagctttcaagccccacaagagcagcttacttcttcttagagcacctctttcagctgctcctcttaacccagtttccctctaaattgtgtagggactagacattcattgactccttccatgtgtttcttgtagtctcacctattctttccagtggccattggcttctcataaccctgacaaggctcctagttacttactgctgcctttctcttcttttgctgcctcttctctttgctttaatttcctttcgttatccacttctcccctcttatggattcgtacacactgtcacttgtgtattgctaccattttttttgtaacttggggcaggattgaactaccgttttttttttttgtttgtttgtttgtttgtttgttttgcaacggagtttcgctcgtcgcccaggctggagtgcaatggcgcaatctcagctcaccgcaacctcgcctcccgggttcaagcgattctcgtgcctcagcctcctgagtagctgggattataggcatgtgccaccatgcccagctaattttgtatttttagtagagacagggtttctccatattggtcaggctggtctcgaactcccaacctcaggtgatccacctgcctcggcctcccaaagtgctgggattacaggcatgagctaccacgcctggcccaggattgaactcttgacatttggagccgttgctaggcagtgagtgttcatgatatgaactgaccaaaatccacagtacatcttgtgagctatgcggtcatgcctcttagatttttttgactagcctggagccaaattgaacattattaacacagcattacagccaatataagctttcatcaaggagagtataccaaaattgagccaaaaactgggatgctttaattccatactaaggcaggaaatgataaggtttcagaaacaggtaaagtataatctgtacaagtgcccggtttaagtggtgtttaaacctaaggataattttttcttcagcttgaagtggctttattgtttatgcttttctttgcactgaaataaggacaatattcagaattaacatacattatgcaacagctcaatttaggaaattaaatagttgtttaaaacatacttgaacatgccaacacattgtattcattttctatccaacagtagaatattattcactttctatattttttgccttttaaaatatatgccaaaaatttctaccagctcttttttaaaaagagaatgaaggtcattgttgcttgaaattaatttttggttttttattatttatttatttattttttcgaaatggaatctcactctgtcacccaggctggagtgcagtggcgtgatctcgtctcactgcaacctctgcctcccgggttcaagcgattctcctgcctcagcctcctgagtagctgggactacaggcatgcactaccatgcctggctaattttttttttttttttgtacttttagtagagacaaggtttcaccatgctggccaggctggtctcaaactcctgacctcgtgatctgcctgcctcggcctcccaaagtgctgggattacaggtgtgagccaccacgcctggtcgaaattaatgttattttttaaaaaatgaattccttcctagcatttgagcttgcttttttagtaggctctttttaaaataagtttttttgagaccataaagggaacacagtgggaaaaagtataaaacatccatgcagacagccttcaactcaaaactgtcaggtctttaaaagcaatcttggaacttttctttttgtctggtagcagtcctattattgaacagatggttaattcacacaataagctggataatcaaatccgatgagctaagatggggttaactagagcaatctgtagtatttagaaaaatttccagggtgattggggaatggtgactgcagtcattatttgggattcgtttctgttagtacaaaaatagaacttaaagtcacaatttaataaaaaaaatttctttcatttagaaaatagccctctccctcatgactaaacaatcatttgtaggggagaagaagagagatttgtatcagccacctgcactgccagttcaggaaatagtatgtgaaattcctgctttatcaggaacccctcctggccttcctctggttctcatttattgagtttgccagatcctgtgctaggtggtgggaccataaagaagaaatgggatgggattccatggtatggtagggaaatgggtctaaacaagtaacaaaacagtgtggaaacctcccgagaattcctatagtatgtttagagaaactgtctcctggaggatggttcacaacatctgtttaattacctttgtaattttcttcacttaacttaaaaactagttagctttttgaatttttcttgattttagaaagcatctctgaggggtatgcctatcttgctggaattctgcaaactcactgtgcctccaacagagccttgtacttaccaagcggtagtaaagacagatttacaatgtctcctttgcagagtgattctacttgtctgttcttcaggtttctttccctcccaacatttctgcctgtcagaatgttttctcttaaaactaaggcccaaccatatgttttctcataatcactgggtcacacccacagccatactgttcttttctgggggcttccttgatgtaaacctttagtatgtcctgatttcacattttctgatgtgtgttctatagtgaaacacagtttctactactagtgtgttttatatttgtcttaatctataggcatttaacagtgtctttctttccccccaccccctctttctttctgattcaaattggaatgatagaagacacctaaataatatgatgaatacttatcaaaacggcgaagttggttttctgaaaaaagctctctgttgtgtgaaatattgaagtgttatccaggagaaggagactttattcaaatagtcatcttatagcttgtctactaaagttgatgaaattcattttccaaactggtttaaacaaaaatgattacttagctatttaaaaaacaattgatcatatctctttcttgtcttatcccttctcctctgccactcttctgatttcttgcataacatttaataacaaatcataagactaacaaggatgcatttcaattccttatggtttatggatcagtttattaggtcaagggtgtggtggggcatgggggtggaggaattatggtagagagtatgaacatttgctaagagcagcatgggataggtgaatttacccagtatgggagtctggcagaagttttaaaatcaagtacatctgagttcaaatcagggctccaccgtttactagtcacctgaacccgggaaggtactaaatctgaaatcttagtttcttcatgtgcaaaatggagactgtaggattgaccttgacaaggttgtgaacagtgtctgaactgggcagagtggtgcctgggacttatttgttgagtgcctattattactttttaaagcaaggaaatgcatcctgatcaagtcacctaatcttaacctcaactttgtataacctgtataatgggaatattgataaattaatgtgaaaaaagtaaaaaaaattacagccatatataagcataaggggcttatttcatgaaggcttcctggatatccaccagccattagtgatttctcttgtatgaactctgctgtagcttttttccaaatctctttggtgtttatcaaacatttatttgatactattgttactaggcattagttacatttcacaagtactgtagttagtggaatgaaacccatatcttcatcattgtaatccctgtggtattttaaatatgataagagcttggtaaaggtttattatataaataattaattttggtattaccatttttctctgctttgcaaactaatatagcttaatagcatcataatggatttatttccatagaatatctaccttattgtttctgtgatcatcttattaacatttcatatggactatgtaaaacctaagataccttccttactaacattgtgtattgcgtttagcaaaactgaattatatttggagatgtaagtctttgtattttgatgacaaggtgaaaaaaccaccttgaatgttcccactcttttattagacaacaaaaatttaggaatagtttagaattctgtagtatttatagtttattttgtggatacacagggatatcacttatgaaaatgtgctaccatagtttatttgtagttgaatatttacaatttcaaacgggttttctcttttcaataaaaagaaatgtgcctaaaaaaatacacacacacacacacagaaaacattttggggatcttggagtcacagagtagagagtagctggtttcctccaaaacttttagactttttagctgatctataatacttaaataaccagagcaataaactcttctcatttttacagtaatagaaatgtcaatattgtccattgattatctgtcctggtgggcctagtttggaggaagggagcacacccaacaattaatcagctgtcattaaaagaaatatacaaggaaatgaagggtttgcattcttctgttgtttaaaaaaaaaaggtagagcctcttggaaactggaatttattttgctcttgagttattcttgagcattctattttgcttttgttcagtgtttagaaattacaataacctgatattgtgttaacatcaataacttctatttgcattgctataaactatttaatttaaataaattacttattactgcataacaagttgccccatgcctacagacgtaacttttttttttttctttttttgaactctcacctagtttctttggatcagggatccaggaatggcttgggtgaatggttttaattctggatctttaataaggttgcaacctaggtgacagtccattttgtacgtagtctacatgaaggtttgactggggctggaaaatctacttccaaggtggttcactcacatgcctcacaaatttgcgctggttgttggcagaaggcctcagctcctcaccatgtggacctctccatagggctgcttgaatgtctggcttatatcaggacaagtgatcagagagagcaagatggaagctaccatgtctttatgtcatcattccacaatatcctgttggctgtacaggttatctctgttcattgtaggagaagaatacacaagggtgtgaaaaccattgggggccattgtggaggccagctaccaaaataaaagaatgcttaatctttagcacatttttataagtgtccaattaatgtttgaatcacgttaagttttaccaaaaataatataattattggtggggctgccccaatttttatcctctccttttccccataattacatgttggtgttcattgatttatggtcatttcaaatatttgtataatagataactgtttttcagacatgtggtaataggagtattatatctaggtaaaaggaatcatttaggtgagcaggactttcactgaggataagctcagaaccactgtacaatctgctgccattctgtaaaaccctctgaattcatcaagccttcagcagacatttattgagtaccacttatgtgttaggcaatgtgaatgcaggtgtcagtgcaaagtgtctctgccctcaagaagaggcaaacatttcaaacagttgttgaagaacatgggctctgaggtcaatttgcttgagttcagttcttgcctctcctgtttagctctatgaccctgggccagttatttaaccttttgattcttttctaattattcccttattacatattacctgcctcacagggttgttgtgagaattcgatgaacagtaccagtgagtactaagtgtcagccacttgagaatacctggagtgactagttttgataaggggagtttccagggagtgatgagatcatatttgagtggagtcttggagagtgagttggagtttggccagcacaaaaatttggtaaggcccgcacctgggatgccaacttgaaggagaggcagggaaactgaagtggggtgaggtaatgcatgctacatggtggcttcaggggaggcactggaggtgggcctggacagccacgggaagggatgtgaaggggtttgtggaaaaaacacagtgcctgcagtttcctgagaccgttttcacttaagcctcttgtttctcattgccttcctaggtactcgcacacctgccagagctcatgtttgtatttatggttaggaacattttgtcactgcagttacctgacaaaagaaggttgaacttttttgtggagactttcaaaagcagtaggataataggattggatcttttggtttgttagtttttgtaaagtgacctggtgaagagtgaacaatggattgagtagttaggaggttgtaggaatcaatggggagctgagggtggggggcaggttcacaagagcccaagccctgacttttgtcaagcttggcatttcccagagacaccctgagcacattacattcccagggtacccacagaactgcccccgctccctgcaccgctcatctcatctcatagtgaattttgcaattataaaagtttaagaaagagagattttaatctctgcatatatgttagtgtcagtttgaattacatatgggagaataagcaccataatctttttggcctttaaatctctggctctagtgacaaccttattttatggatgaagaagataacaattatgtcagttttagaaactcattctcagctatctacttcccactcttaaaagtttttcttgaaaacacaactaaaaagagagatgagatgaggctttactgaagaaaagttggttaggaagagattttgatttaggtaaataagaatagtttagaaaccaggctagacttcagacagctcccaggcccaaggatgggaatgagggtagttgttagtctatttagcctcttctcacttggttttcaatttgctatccagtcgtctttcgcagcagggttgacccttcattgctttttggatggcaccgtccacagacaggctcttttgccaagtcctgtcaccctcacatgtgtatatttcttttatcttctttaggaggtaggtaggtctacttgaagccagaagactctaactcaacatctggtataagaagatgcagtagaaattctgtgtatccagctagcttaaacctatgtatttttattagaaaaaaaaaataatgtgactgctactttctttttaagatttggaagcgggcactagtgcacctttttgttacaactgtaacactatgtaaaaaataatcaggaagccattggcatttttataacaactattaagttatatgaagtgtgagtgtagtaaccagctttggagacaaagtcttcattcagggctatagcagctgtgcagggagagcccagctatgaaaggggaaactttggactaactttccccttcctcagtggtgtttgaaatgtgtatgttttcttacatttgcatcagatttggggtctgccagttctttcttcttatgctctaatttgatatttcatattatttcatgactaggaaatttaaggattttaacatttgggggcggtattttctattcataataaaagtagtttgatgtctggatagatttttaaaaaaaaaaaaaatggttgatggaagctggtcttgttgctaaagtaaatctttctataaataaatgcagaaacatctgtgaagggcatagtctgaatgtggcagacatatgaattgcgtcaattcccatcttgcggccaagatttcttccttgggctttctttatagctaatgttgtggcaaagtttcacattctcacagcattaggcagtaaaatggtcaaaagaaatggtgccaagttaccctctttcttaggttagtcagtagtaggaatttgtacttaccaaggaaaagtgcagtgtatttttgtttttattttttaggactgaagacctgagaggtctccttcaacttcagttttagccctggctttaggcaattttccaaatgtaaagctactttcaagaaatcagtgtggtatcacagggagctggggtcagtagaaaaagaagacacaaagtctctcctagaactccataggccaatcaaatgaccttttatagaaacaactgaaattcctttttcaaaagcacaaaaatgctaattgaaaccaaaccaaacaaacccaccccacaaggactgcaattcaaatggctaagggggaagagtggggacaggggaggaaaattcttaggaaaattatctgaagccatacacttgtgttttgctctttggtgattgtatgttaaaatggaatgatttagtatttttaagatacaaattagccaggactgtaagaaccctatgtacctttgcaggtgcctgtgtagatcatcctagaatacctgtgtggtgctgtccttcctcaagactacctcattctcactggctcggagactcctgcctgctgaggtgagtggtgctgaggtgtactccttacatgcattatatcctagaagagtagcactttcaatgacttttaaaaaaacctttcaaagttttgggagacttttatagatcatgttcattagtaaagtcttaagaatcatcatttgtaagccatttatttagagaaggactaagtataggtggtgatagtatctgttaccactgcagtataattcctaggtccaaatttgggtcgacactaaaagcatcataaaatatgccttaggtttcaagtttggagtctgaagcaaaatatttcaaagctgtgtgtcaccactcttgggctttctgagcactattctactaatgctataaattggcaacctcttttaaagcagagaagtatttctaataatgaaaggctagaaaatcttgatggctaactagtttttcagacttttctctataataatcttggtaagtctggaaaatcctttagcttgtgtttccattttttaaataatgtctattattggcttcattaagtcaagggggggcataaaaatctccttaggtaaggatattcaactaaattacatctcagttttagtatgcttgctgtatatcatctcttgtctcttgagcatttaaatgacttattcgtcccaggagggaaaataatttgaccttgtttgtagtaggtaaatcacttatgaataaattcttcacactttacaggtaaataaactctgtaagggcaccagccagcgtgctgtctcataaattccttaatctctcatttgcaaaagttatgtgtgtgcatttttaactagatgctggatctcgaaggtctcacataaactgatttccccctgaaataaaaaactttaacttcacagccttctaataattgctagattatatggagagactggactcctaaaaccacaaatccacatcctcaccagttcagttgcccttttgtagaccctggtatgttgcttacagcattagcaaaaaccatgactagaaggctgcaaatgttgagagtcaaaagatagcctgattctaataaggcaattttgttatatccacgtgagagtcaaaaaagcctattcagaccctatttttaaggccttgccatttgtaatatggcctaaaaaggaaaagcataagaaaaaagtaatgtgctatgtagtacaattgactaaagttctctctgattgtcacttaaattttagttttgactaccattactgatgaagctgtgctataaagctttcttttatacattaattattttttattaaggaggatctatgtgtaagttataccaagaggaactgtggttgaggcttaatgtttggggattttgtgtatttgggtttgaacattttagttgttttgtttctctggatcactagtagttatccactaatacaggtggggattgtatgagtttgattgattggggattgctgctgaagagttttcattttttgcggtttcttctcaaacattcaatattctctaggtcagcagcctttaattttgatccttgacttacagtacaaagagacgcctttagcttactgctttgtttcccttttttgaatgaagtgttatttaaaaaggttttaaataaatgaagggtttacctagcattgaggtacatttgtacctgaaacttagaaaacttgtttgcctctgttggctactgaacctggtttacaggagagggacttccctaaacctttctgaatgaaacatccagttctagtcatgttaactttggtggtcagcaaaaccagccttgaagtctcagtattgctacactgtaaaactatcttaagtttttttcatggagctacttaaaatttttaatttcttgcaatcagaatagctttctactaaattacatttttttccccataatgatgcagtttctcttgagccatttttcttttacagcatgtgatattagagaataatttacagtttatcacgagatacctttgttaggctgtgtgaaaagaaagtttaaagcccatattttgtgtaaaaagacagattgggtaaaacaataaattttacagattatttatttgcttgtctttctgttctagataggaccgtaatcttccctcatcccccctttctagtaccttcccataaaatacgttagtgaagggaaaataatgataaacaggacttagttctataatagttcaaaactgccttccaagtaattttccatactttctggaatgaaacatatggcagtaatgtactgtgcctctggtaatggaaagtagtttaaaaatactctcaatattttatattttaaagggtgtgtgtatgtgtgtgtgtgagtgtatgtgttttcaggtttttctatcccatgtagatttaatggaattatttttatatgcttatacctgtttttacgggtttacataggggcatttttgaataaaacttgtaacgaggtgtttattgttacagataatttgtgcatgcaagttttagaaggcttgaaatgatcttgcagagaaaactacttggtaggaggggggtgacattttctgtaatttaagttgtcatagtaacctgcatcaagacgcatacttggaatccaggcctgaagaatttcagtgacaataaacattccaattgcattcatcatcctttttttggccaagaaaggagccatccattgtgacctaattattttatttccgtttttagaagatgagtaataatttgcatgtttcagtgctttgaaacttccctagtagaataaaaatgaaaaaagttcagctgtttatatttgagattgacattttctgataatgtatcgcaaactagttatttcagattttgagacaggtttggtgtgatgattacttaatgaaatatgaaagaaacaggatttgatactgattgaagaaattgccatatccattggttaacgtgcaagtctaatattaagaatattggaatttggttttcatgaagctctgattcgagaatgttatgacttccctattatcagtttgctaatatttttatttgatggcattttgtactgcagtcttaattgggtacaaatgtattttagtaaaaaggatgaggcatcgtttttattagtggaatcagcttactttgagaaatttgtatccagacatcatttttagatatctttcacaaaggactgtagaatattgtttctgaagacaaagctttttttttttttttttgagatggagtttcactcttgttgcccaggctggagtgcaatggcgtgatcttggctcgccgcaacctccgcctcctgggttcaagcgattttcctgcctcagcctctggagtagctgggattacaggcatgcatcaccactcctggctaattttgtatttttattacagacggggttacaccattttggccaggatggtctcgatctcttgacctcatgttccgcccacctcagcctcccaaagtgctgggattacaggcgtgagccaccgcgcctggcaagaaagcttttcttaaggtttgattctctcttgccttctgcaagatattgaatgctagctaagattatttgaagttaaaaattctcaaagaaagaatactaggagaaataaggtggtaagagtgagtatgtgtgggcgtgtatgtgtgtccattcatttaaggaaacttggaaaataaatagggagagttcatggctagtctaattaataaaaaaacaaaatcagaaatcagtttaccgggaaaatgtgaaggaaaataacatcactcctctcaatgtttagagatatttactgttaatattttatgggaagtatctataatttttttttctagtcagtatataatttattgaggatctgttatttgccaggtaggcttaaacaataaacaagacaaagaccttaccatcatggtttttacaggctctgggacaagtaaataagaaaatgacacagcagtatggtaggtgagtcttctgatggagggagagatgagtgaggtttacctacctaaactagcctgggtcatggaggagaagtgatcaggttaacctttagagggctcaataatttcaaacccaaattagtttcctgattcacagtgaaatcaagagaaactttttccaccaaaccatgctctgtgatattgataacaatgactaatatttatatagcactttctatgggaagtatctataattttgtaaacaacattgagatcaagctcagccaaaatactaaaacagtgaatttgacctaaaattattagaatttgcaacatacttgctgttatcagtagtgtctaaaatagcactgatgggccaggcatggtggctcacaactgtaatcccagcattttgggaggctgaggcaggaggatcacttgagttcaggagttcaagaccctgtctctacaaaaaaaatttttaaaaatcagctgggcacaggattgcaacctgtagttccagctactccggaggctgaggtgggaggattacaccactgtgctccaccctgggtgacagagagtactattgaaaaggagactaaaaattatttgcagataataaaaagttcccaaggcaatcaactaaaatgtagtttagtagggttccactgtaaatcatgtaaatatcatgatcttttgtgtatgataataataaccagtttaaaagtatgaggaaaaaagcccattcatagtagcaacaaaaaatatgccagggattaaactcggtaagaaatgcaattggcctgtagaaaggaaactagtgaactttgctctgaagataatgaggagacttatgtttctggataggaagacaattctttagttagttttaatattttatattgatttgtaagttgaatataactccaagcaaaatctcaggaatttctcatagatcagtgattctgaattattttacatttttatagaataaataagagccaagaaatgtttatacggtaaagaagaataatgaaggaaaagttgtaatgctagacattaatttgaaaatggtatgattttgataaaatagacaaatatttggagcagaatggaaagctcagaagaatgttgtgttgataaaagtgccactgcaaataatgaatgtaaaaatgtagtaatacatatactagaaaagagtgtatatgaatatctatcttgggcttgggagaaagaagctactaaaacatagaagcaaatgttaaatggaataattcctatgtgtaatgatactaaaaattaaaataatttaattttgcttatatcatgtacaaaaaggcagtcacctggggaaaatattcaagtcatgtattcaaatttttttctttctataatatgtaattacattattaatatataattacattggtaatatacagtcatctgtcacttaacgggaatacacattgagaaatgtgtctaggtgattgttgttggggtgcgaaaattatagagtgtacttctacaaacctagatggtatagcctcctacacacccaggccatatgataccccatggctcctaggccacaaacctttacagcatgtgactgtactgaatacggtaggcaattgtaatacagtggtagatatttgtgtatctaaacgtatctaaacatagaaaaggtatggtagaaatactgtataaaagatttaaaagtggtacacctgtatggggtattgcctagaatggagcttgcaggtctggaagttgctctgggtgaggcagtgattgtttagtgaatgtgagggccgaggacattattgcactcttctgtaaactttgtaaacactgtgtacttaagctgcacatgtattttaaaatttcctttttttttttttttttttttttgagactagggtctctgtcacccaggctggagtgcagtggcattgtcacagctcactgaagccttgacctcctggggtcaagtgatcctcccgcttcagcctatcgagtagctgggactacaagtgcatttcaccacacccagctaatttttaattttttaaaagtgcattccatcatacccggctaatttttaattttttttttttttttgtagaaacaaggtctcactatgttgcccaggctggagttgaactcctgggctcaagcagtccaaccacctcagcctctgaaataggtgggattacaggcctatttttaagttttaaaaattaaaaatttttatccactgtgttttgcctattaacaatttttattcttcaatatgaaattaaccttagcttactatataacttttttactttatgaactttttaattttaactttttgattcttttgtgataacactttgcttaaaatacaaatacattgtacagctgtgcaaatatgttttgtttatattcctattctataagcttttttctatttttaaaattatttattttcgaacttttttgttaaaaactaagacacaaacacacattttagcctaggtctacacagggttgagattaccaatatcacttttcacctccacatcctgtcgtactggaaggtcttcaggggctataacacacatagagctgtcatctcctatgataacagtgccttctgctggaatacctcctgaaggacctgcctgaggctgttttacagttaacttaaaaaaaaaaaggaaggaataccctttaaagtgtggattaagagtatagtaaatacacaaactggtgacatagtcatttattatcattttcaaatattatgcattgtaaataattgtaagtgctgtttctaagactggcagtgcagtgagtttgcttacaccagcatcagcacagacacttgagtaatgaatgcattgtgctacaatgctatgatggctacgccgtcactaggccagtaggaatttttcagatccagtgtaatctaatggggctatatgtggtccatcgttgactaaaacattgttatgtagagcatgactgtatgacatagtatataattacaatatataacaaatagagttggttgggcacagtggcttatgcctgtaatcccagcactttgggaggccaaggcgggtggatcacctgagattagcagtttgagaccagcctggccaacatggcaaaaccctgtctctactaaaaatacaaaaattagtcgggcttggtagcaggtgcctataatcccagctaatcgagaggctgaggcaggagaatcgcttgaacccagagggtggagggtgcagtgagccgagattgcgtcactgcactccagcctgggtgaaagagcaaaactccatctcaaaaacaaacaaacaaaaaaaaacaaatagagttaatacctgtattatataaaaaattattggccaggcacagtggctcacgcttgtaatcccagcactttgggaggccaaggcgggcagatcacgaggtcaggagtttgagaccagcctgaccaacatggtgaaaccccttcctactaaaaatagaaaaaaattagccaagcgtggtggcgcacacctgtaatttcagctactcaggaggctgacacaggagaatcacttgaacccaggaggcagaggttgcagtgagcagagatcatgcttgatctcttggatgtcttttatttctttctcttgccttatttctctggctaggacctccagtgctgtgttgaatcggagtggtgaaagtaggcatccttgtcttgttccagtttttggaggaaatgctttcaattttcctcatttagtatgatgttagctgtgggtttatagtacatgatgtttattattttagcacattgtattattgaagattcaaaaacatatacatgacacacatataaataacctatacataaatgtaactcattcatctagagttaatttttatatatggtgacatggatccagtttcattcatctacattcagctaattaatttcccagcaccatatattgaagagggtgtcctttcctcatgtatggtatgttccttctgtgcctagtttgttgagtgtttttatcatgaagggatgttgaattttatcaaatgctgtttctgtgtctattgagatgatcatatggtttttatccttgattttgtttaggtgatgtatcacatttattgatttgcatatgttgaaccatccttgcatgcctgatataaaacccatttgatcataatggattatctttttgatgtgctgttgagttcagtgggctcgtgttttgttgaagatttttgcatctgtgttcatcatgaatattgcagacctttgtctctgtaattcccaattctggcagtgggagaagtaaggtaagaatgctcatacagtgcaactagaaggcagactattatgcagccaataaaagagtttatctgcttatctatagattttttttaactctttaatgaaatggaaaaatgataacctgaaaagtgacaatatcaggacataatatattataaccttcaaaaaataactgtatagggggaataaaaacctagaaggaaacatactaaagtgttaatgatgatttttctccaagtggtagaactataggaaaataattactgtgttcatttaaaacacagattatgtaaagcaagtattaataatcagaaattttatatatagattatatttttaaaaaaatctaaggttgacctgatgtctatgatttcattatatgcctttaaaaatacatatatgtatttatagtaaaaaatacattttccataaggataaatgtatcaaggggccaggtgcggtggctcatgcatgtaatcctagcactttaggaggctgaggtgggaggatcacttgaacccaggagtttgagaccagacagggcaacatggtgaaaccctatctctacaaaaaatacaaaaattagacaggtgttgtgacatatgcctatagtcccagctactggggaggctgaggtgaaaggattgtttgagcctgggaggtcaaggctgcagtgagttgtgattgtgccactgcactcaagactgggtgacagactgagaccctgtctcaaacataaaaaacaaaacttcttgagactggactatacacagaattgaataacaaggggcatatcacagtctctaggcagggatgaatatactgaactcctgagctgttattaatgaatgatttgactgagatttatgcctacattgtcagtatcatgcttcctggaggtgtggggctcagcatctttgggaatgagaaagagcagtgtgttcctgtcttagtctacagttgaccttgcacacaacatgggggttagggagtgccagcctcttgtggagtcagaactctgcatataactcttgactaccccagaacttaactactaatagcctattgttgaccagaaggcttaccaataacatacactgtcaattaacacatattttgtatgttatatgtattatatactgtatttgtacaatgaagtaagagaaaagacagtgttattaagaaaatcttaaggaagagaaaatatatttactatacagtaagtggaagtggatcatcagaaaggtcttcatgttgagtaggctgaggaagaggaggaggaggaaggggagctcttctgacatgacatgactggtaccttctacttttctgaaattctggaaaataggtttttagcaaaatgaaattattagtcattgtacatttaaattgttcattgaaaaaaagtaatacaataagtgaaaggtataaaatgaggtggttcatgcttataatcccagcactttgggaggccagagcagaagggtcacctgaggccatgggtttgaggccagtctgggcaacaaagggagaccctgtctttacaaaaagttaaaaaaaaatggaagttatgaaatgaaaaataaggtttcattctttctcattgtttttcctctatccaaaggtaatcctcattagcagtttcttgggtttctctgcagaaaaagaaatgtgtacatataacgtgtatttgtgtctttttaaatttttacggatggggtgtgtgtgtgtgtgtgtgtgtgttttacactaggtttttgttttgttttgttttacagattgatttgtttaattgccagattaatcttaaaggcagataggataatagtttgcaggttgaattggtgagagtttggtgaccatttattattggtttgcattctttcatttggctgagtttgtaaaaatggggtcagtatgtaattacctgacaggtgtgaaactgcaactgattctactcctcattgcaccggtgactgtcatcttaatcaagtcattctctgtgacctagttttaatacgtgaatattgagaccgtgcctatattaacctgaatgcagtagagaaaatgtaaaaataagacaaggttagaatataaaatcttttttttggttgttgtttttaagctctactaagataattttgcaaaggctatttcttttatctaaagtgagctttgtgaaagttataatactagaataggatgaaacccatcgtttctgcctttgaggaacatatagtctcaccatgttaaggttcatatcagatgggaaaaatacagcttttattgccacataataccatattatatcagctaatgccctgtctgtttctcccctactttcttttactttctcccagatttcagctaggctatacttgctccttagaaattttagaaaaacttgtcttgaacctccaatttcaatacttgtgacagtttccctgtgatcttcctaagtccagagttctgtatcagttgaatggtttttcatctgtctttgtcatctacttcaatgtgtagtcttcggttttgccctttaaagctttaaacgttaaacctttctcttccgttggtttctgttaaaagacaaatatgggtgcatatgtgcacagacacacacacacacacaccctgcttagtagacctaccaaagacccaggagttagaaaaaagatactcatattgtaggaagggcagccttgatttcttcctggtctctggcttcatccttatctctatccttttcttcttcccttcccttcaggatgtcccaaggaactgtgtctgtgttctgtagtttcagaaattgccatatatcatctagagtgattaatctgggtgcaagtcagcttctcatgttaattaattgtatgcccttgagtacttggtttctctaagatctcttttaggtctctaaaacctccagtctccttacttgaatattggatataatgatatctgctttagtggatgtttgaagactaaattatatatgtaaaggacttagcatgtaagcaattcagtgaatgataactgtcatcctttttattaaaatagtactgtttttcccaaatgcttgtctcgctctagacgtggactacatatatgtttatacaagtggactttcagtcttttatacttaggggtagttgtttaaaccagacactttggagagggaactagggcactattgataattacaccagaataacagtttaaaccattgctgttccaggtaaaccaggacccatagtcactctagatacacgcttcgtttctgactcatggtgcgtgctcagagaacaagggcccttgtccattgagtgggacagtgttggaatagtggaacatgggatgaaacgaggtcacattcatctttcttagctttagttcttactcactaaaatcgagtttaacaatacttagttcattttgggttgctatagaggaatacctgagactaggtaatttgtaaagaaaaaaggtttatttggcttacaattctgatgtctcaaaaagttcaagattgggcatctggtgagggcctcaggctgcttccactcatggtggaaagtgaaggggagccagcgtgtgcagagatcacatggggagagaggaagtgctttaggggtggcaagtgaggggttggccggagggaggaggtgccaggctcttttcagcaaccagctctggcagagctcatagtgagaactcactcaccatcaggggagggcattaacctatttatgaagaatccgcccccatgaccctgacacctcccactaggccccacgtccccactgccacactggggatcaaatttcaacataacaccagactggaggaagttataggtgtcaaagtttgaatcttttgtaaaaggaacaaagccttttcaccattgtctttcatagttgttctcctcactagcaaatctgtctctcagacctggcattacctagacttgaggcttacagcatctactggaaggacaggtaggtagtaagtggtaatagtcatgttgtatatactgcaagagcagaatgaagaaggtgcctgggagcacagaaggagctccttcaactgtgcagaggtgaaggagggcttcttgtttgatgtcagtgtagctgagtttgtaaaggtgagtgggtctttagagaggcctactctcacaggaagtagcctctgcaaagcccagaaaggaacaggggcatagtgtttttgggaaaagcaagtacagccgagtgtgggcaggggatggctgacttaaaagcagcattcttactctagtttaacagaaacagccttttagtggcattgggccatatggtaattgaaaggatcaaaattatttacataagtacataaagttctagttggaggataagcagaagtagtaacaatttggaataacctaaacctcacatctgtgtaagtagaaaaattacattttttattcctgatcatttctttatcatctcaagacattaaatatttaatgcatcctcattcttcaaaaggatattactttaaaatgttctcacatcaggtgcggtggctcacgcctgtaatcccagcactttgggaggccgaggcgggcagatctcaaggtcaggagaccgagaccatcctggctaacatggtgaaaccctgtctgtactaaaaatacacaaaattagtcaggtgtggtggcgggcgcctgtagtcccagctactctggaggctaaggcaagagaatgatgtgaacccgggaggcggagcttgcagtgagccgagaaagccactgaattccagcctgggcaacacagcgagactccgtttaaaaaaaaaaaattatcacttaaatgttagatatagatagataatattagaagctatactgtttccagccagttgatgtaatgttgttccatcccctttagcatgttctcctgtgagctgctatagctactagacaattttactgtgtaaattctttgcaaatttgccttactggagtgggaattatgtaagggatacagtgattaaagatcacaatatttttggtacaacaaataatgctttcagaaacacaggctgatattgtcatttgtattccattttgctccaaggatcatttgagtgtatactctaaatctttcttatgttaagaagtagaaatatagtgatttttacattaataacagagtaatttcttatagtaatatttgtgttctcatttgaacataaaataatgtcatatgggtggcttgacctcagctctctagtaccatagtgtctgcttctgtttaggcatattgcaagcatctgcatagaatcttaattttcttttttacttggaaggtactttggagattcagatttgaggttgacgaaatcaagacacagagactgatatgctccctctagccttcccttctaggtcaggtcactcttttattcatcttggtggtcctggtgcatagccagtagataaagctctgccaaatgagcagatatatctgtatattcacagagcctgaattacaacccagatcttttgacttccagatcagtccagtgttttttcttgcacactggtagtcccctgtgtaccacaaaatggatttctgtagcagcattcccaagtttcaagttatatgatgcttagctgccagctatcataacaccatccttttctcacaagaaatccaagctcaccgacgtgttaggataagggactatctgggctgagaaccaatggatatatgaggatgttcttgaataaattttaattccacactcatgatggaattttgtgcttttcaatatgttgttaacacttctactgatcaaactatagaataaagctatacctacaggagcacagaccttatttctaagtagtgtttctaggcaggagtgattctgccatcaggggtgtttgggaaattggtgagggaatttttggttgtcacaatgatgggaaggctgttactggcatttagtggatgggtggtggcggagatgctgggcatcctgtagtgcacaggactgtcccacataacaacttccaaatgacccacgttggtatttccaagtcatgagactggatgagatccccaagggagtggatagaaatagagaggaggagaggactaatgattgagacctgggatactcaaatattaaaaattcctagagcagagcagactgagaaggaaccccagtaaagcaagaggaaaaccaagaaagtgctgtgtcctggaagagagtgaagaaagtagatcaggaggaaggagtgacaaactgacccttatatttagcaaggtgaaggtgattggtgacctcgataagagtagtttggttagatggtaggggcaaaagcatggcaggaatgagcttgatagagaatggaaagtgagaaaatgaaagcaagtgtagacaattcttgaaaggagttttgctgcaaaaggaaagtaatcagtgggaggagagagatcagaagaaggctgttgtgtttaagatgggtaaaatagccatttattctttgattgaaaagaaaaactgatggagagagtggtggtcctggagtgagggtgagggggtggcatcctgatgcccacagggtcctgcccctgcagtagtactggtctccaggccccccacgtgccatggcccaggaatggctaaccaatgcctaatccattctgaggccttgggaccagaaggcttccttactgtccaacatttgttcctctttcatttaggagagttagtcaggcaccagcaaagggtttgagttttaagtcgaaattaaattagaaattagaaattagaagggaaggtagaaccaatggctttttctccgtaggcaatgacttgagagcagctgaagtttttccttcttgtcccctgggggaccatctttaccaagatggcacagagcctgtagaataaagcaagtgagtcatgcaggagggcacgaagtagaaggaggcattgcccagggtcatgcaggcccagtgccagcacatgagaacggaactcccatatatttgtgccccagctgcctaacctgcccctcctgattaccccggccctggggagggcactgtggtttaagggaaacagtgggaaagctctttccttaattatctcttctcatattaccagctggagattaattgaatgtgctttagtttaatctgatatttcctttccccctttatatttagttgacttcagtcactttaaggaataggaggaggatgtggtgaggagggaaaggaatgcttctgggctgaacaattctattgttggtgataggagagggcggggaatgattgattctgggcctttgcacaactgagggacaacgtgagagacttctgtatacctaagatgcaggcgagggggacctgggggatagaaaggagataaaagagggtcaatcctggtcacaaagaccagaaaaaaaaacagctcctctccacctaagtacccttgtcgtttttaagtgttgtaagggccctcataccactttatctttccttccttggaatccaaaagtgatagatatcactcaccttgttaattaatcccagggttctgcccagtgcagatctaaaagcattctcctgaggccatctgaggaattgtccatctttgtacattagaaaccacaggaacccttacaggaacgtctacagcatctggaaaataattctcaaggcataagtttatattgcagtttctttgggatgaggcctgctgctattttggtttgtgttagccccagttctgcctaagaactgagtcagtcatgtgtccatggaaagaaatccccattgaaaatagtaggtactgactgtagccaggattgcataataggtcctctttaagaatttcctcagaacctttccaaaaagattagccagatgcttcccagaagaactttcctcttcctgacgagcagtattatttttgagagtggtagatgactcttctaagccttgcttcctccctgcctgcagtcccaaaaacacctgagtcaagtaactatgataacttgacataattaattaattgagtgctgtggtttgaatgtttgtgtatctcccccattccccccgaattcaaatgttgaaacctaatcaccgttaggagctgtgacctttgggtggtgattaggtcatggggagtcatgaaagtagggccatcataaatgggattagtgccttcataaaaggccctggagagctgtcttgccccctccgccatgggaggacacagctagaaggcaccatcactatcagcgaaccagaaagcaggctctcacccgacgctgagtctgacggtgacttgaccttggactttccagcttccagaaaagtgagaagaaaatttgtgttgttcataagccacccagtttatggtatttattatattagcccaaatggactaacacagtgactcatgaacttcagtttaaatctagtgtctttaaagctttgttattttatgcgtatcatatctgtgatatatgtataacatataataacatatccatggcatatagtaggcctgtagtgaatgttttttgaaacaattaggtacaatgtgtattgtttttctttatcttattaggcagtagagtatattagttaaagttctggttccagaatgcctgaattgaagtctcggcttttcctctaatgaagtgtgtgatcttgggcaagttttataactgctctgtgctgagttcctcttctgaaaagcagaaacaataatacctaccttacaagattattatgagacttaaataaattgacacattcaaagcacttagaacatctcccggcatatatagtaagaatttaacagatataacaaaagctctcaggcatttaatatttaaaaagtgagaaaaccaaatctcctctttttcctcaaatagcagtgtaactggcaatgaatatttgagtattgattgtgtgaactgtcattatttagccttttttcagtggctataaacagcttcctgtgtttctgaaaaaggaggaatagacatcatctcctcatccagtctcataccagtgtatcactcatgacacctaaacataactatatccatatattatttatatcattgttaattatgtgagttgaatttttaaaatatgtgggcctatgattagtatccagatttgttttttctgggcgtgatgttccttccatgtgaggccttttttcttttttttttttttttgagatagggtctcactctgttgcccaggctagagtgcagtggtatgaacatagctcactggagccttgaactcctgggctccatcagtcctcctgtctcagccttccatgtagttgggaccacaggccaccatgcccacgtaatttttaaatttttttgtaaagacggagtctcactttgttgcccaggctggtctcgaactgctgggctgaagcaatccttctgcctcatcctcccaaaatgctgggactacaggcatgagccactgcacctggcctcacgtgagttttaagagctgtgccagtttgctctgtcttcttgctctgttcctacattcaaatttatagaatcaaaataaaggagagtatatctcccggagctaaaaactgatcaggttttcatgtaatcagcagcatgttttccacaggatcctttgttattggcagtcctgcccaataacaataaaaaggcctgtattctcgctgtgtggtgtgtctgcaagactgccttgccagctctttctcatttctagtaattcaagtctagtaatccagtaaaaccataagaaaatgtggcttctctagtgatagccacctggtgggacagtactttaaaattcataagacacttttaagtagtgagtatattttaattgcttatagcaaacccatagagatatccttatagatgaagaaatgagcctccatgagcttaagggagttcaggattatatggtgctgtgaactcaagtccgctgattctttaaatcctgtgtccttctagttttactattttccatcaaattcactcaggcctggtaaaatcatagtaataacacctggagtagtagccaggcctcttcattagaaatcataatcatggagttataattccaataatattgtacaacttgtttgctgttgaaaacttcactttttttttttaataataaaaggaccaagtttacttttacctatgttgtttattcaaactggttatatatcataagcattttctaactagctttaaatttttaaagatgtttttctaatatatgtatactttgttattaagtttcatgttgataaaaaaatcctttttcctttaatgtggctattgttgaataggtctaaattaagactctgaaattcttcgtagtgtaattaccagtttttattctatacttggcaggtaggtgagtggtcctgggaagaatgaaatagttctattttgtaaccattatttttctaaaccccatctgagtaaatggcacatttttatattttgtggacaaaactcagacctgtggtattggtttgaggaatatgagagtgtggacctttgttgctttgtgaaattgtgttcttgtgccctgcctgagctgccagtgcctttgtacagcaggtataggcacagccagctggtgccttgtgcccggtgacttgccaagtgggtgctcactcactacagcagcaaacttcagcaaatgtgttttaactaataacgttcatactagcgatgaaaacatatgtatgtgtttcctatgcccatggcagacataattagttgatcatggtatgtgttcatgctgagcctgatcatccttttaagcatcacattcttggcatgtacagtcagacactcaagcttagtaggcaagataaaacgtatgtgctatccttggctctaaatgtgtctgtgttaactttctcccaatatgttttgggaaataataaatacgataaattattgcggtgttttataggaagaacagacacacagcatttttctgtatgtcttgattggtttggacagttgcacttaatacaggtcattttcatttttaatagcatgtaaaagtctccatgtcaaattttttttcaggttgattactgattcatagtatgtatttatttgaaaattatttttcaaatagatatttgaaataagaaacaaattttgacaatactcatagtttgccatgatgaaattagatctttttatataattagcagaaactttgaagttttcattaaattctaatcatagaacaaaaatgctaatcctttgagaattgaatttaaaactctgtgatatggctgtaattgtggaaataaaaacttgttaagattaggattatagcttttgtttatttggtcctttttcctttgagaccttactatacttcagtggaaaacagcattaaaaaaaaaatattccatacaggctgggcatggtggctcacgcctgtaatcccagcactttgggaggccaaggtgggaggatcgcttgagcccaggagtttgagaccagcctgggcaacatagtgagaccccgtctgtccaaaaaaaaaaatagaaattagccaggcatcattgtgtgcgcctgtagtcccagctacttgggaagcagaggtgggaggatcataagcctgggaagtcgaggcttcagtgagctgagatcgtgccatcgtactccagcctgggtgacagaatgagatcccgtctcaaaaaaaaaaaaaaatccatatatggtcaaaaggtattttaggctctctactgatcccttggtaaaagatgctgcacctactgcaagattattgaggagcactttgtcatggagatcagggttggaatgtttgagccaaagaccacaaaaaactgacagtaatcaattatcgttcctgcctgctgcttagcgtttacgtttctagaaaatgctctcttcagttttctcctctgaaatctgagacacagagccgagaaatagaaaatagtttatgtcaaaatatttttccgttgataggccacctgacaagcaaagagattgaggtgaaatctcatccaaattaatgtgtgaggccgtggaaaactgcttatgttttgtgtacgtctttaaagttaagtaagattatacttgaagttacttatctcagtttgcaaagaaacagaaattatacctacttattttttagtgatgttgttagaataagaaaacaatacctaaagttagcggacctattgtgttgtaagaaatgctgatttggatgtgctttggaaaaataaacgaaattaaagaaaataactcattagcaatgttttttttcaggtttgctttgcctgttcagtggtacaatttctcttttttctttattgataagaataaagctgtgcatactttaagaacacaaggcggcacttctctataactctgtgatcacatgatcacagaccccactaactaactaatggttactttcaagtgcttgtggccagttggagtttataatttgttaccaaatcactaattatctttatttttaacctgtattttgcctgtcgagcagtcataatctctaaaattggagactcagaaccttcaactataaagagtttgtttaactagaggcaggaagagctgattttcccttgaaatgcatggaaaattcattcatttttgtttgttttaaacttttaaaaatctggagttattaagggctgtttttgggtttttttttttttttatttgtttgtttggttggtttttgttttgcttctggattatataaaatgaatctccctggttttaaagtctaataaccagtgcttttgctttgctgtttttgctttggttatagtggtcctttaaataaagagttagcttctcctttggcctgagattttaagatcttcccaataatctttaactgtagccctcatgtccagatgttttcttgccgtgttaccttaatatgcacatttttgctgcctgttctggaagttcacaatttggaacctggggtacaggaaggggagtgatctttttgttgatattgttatctacatgtaagaatctgtgcgaaagagctttataaattgcagattttatattgagtgggcaaactgtttttaggtaattctaactataaaatataaaatttctaaaaatcaacagacttccttcagagtttaagttgcttataaaattagtttgttggcagttatccacgtcagtccatttcataaggtgtgaaaatattttcttcttcctctttttcttgcctaatgttacttgattttcatctatcctgttgaatagttgtttatttttgtgattttctactcacattaacaaaacaggatagataatgaaaatatcatctgaagttcattcattagttgagatctttttcttttcatttctagtggtttgtaaaattgacctaattctttcatttatctgctgtgtacaaactagacaagtatttttttccacaaatttatttgcttcatgtttttagtactttccactggaattttttttcctatgtgtgaataatattaaatgaggaaacattcttacttggttttctttgatttttcatatgggaataaaaagctatttagccataagtaaatgaaatatttttttaaaaaaatttttggttgcttttgtctttatatcaatattgttaattataagtaggaatatttatcctaagttacacaaagaagaattagaaaacagtgctttctgttgcacattcatttgctggaattggatatcaatctttgtccaatcaggagagagaaactgcatgataatttgaatagggaaagtttaatgtaaaagcctataaatataaccagggattggaagttagagattgataagaggtgaagagactctcaagaatgtaagactagcagatgtaatattatataatatgaacttaagagctactactactaaggctgagatagaatgcccaaagaagaggccccctgggactgtgatccatatcatgttggagagggcctggctcaggctcactggaaagcagagaagtcaccttgttgatggaacttaccagtaatccactttactagggaggtgtcttgccaggggcagtctaccaaaaacgcacccaaggtgagtgttgagggaacctgctggttgctgctggctcttgtacactgtaggagctggtcacaggagaagctgcatttgctgcaggacctgcagactggggaagcccccatgccacaggaggaccccagaaagcaaaagccgctcctcttgccctttcctgtgtctcactagtgccctctcttggcaaaacttcacatggagtgactatctaggaaaaagtattttaagggtccagatccattttcataaaacaagcaaaaaggttgaagttggaacagaggcaatcattaacagcccacacaacccgaaaagtctttcatggtgaaaaaccctttccctttcccattggctatgatagtttgtgagatcacgtgatttcatttctactgaaatgtctgtaagagttatatggattgttagacatactgatttattaacttttgttaacatttattaatatttttcattggaggatatctgtattcttgagatgaatctttgagaatttctgtgtcactataaacaccagtttttgtttactttttttaaaggattgcttcatttaatcatgtttcttagctatatccattagaatataaatttaaatgctatgcaagtcatttaaatttgtgtagcaaatttagcaaatttggagctgcctatgaagattttattcttaaactatttttgaaatagctctagaacctttttttaataaatcaattttttaaatttaaaaattctttacattatataactagactaaaattttctaacatgtcactttaacatttttttattgacagataaaatttatgtactaaaaaaactaaactaaaaataggaatttttataaaaccaaatgtggatcacagcattagtaaccatagaatgtgattttaatttcttagaggatgataaagttgtcaggaaacaacacttacaacttggaatcactgaccagcaattacatagttgcgagaaccagcagaaagggggtgtaggtgaccctatgttgttcttgttgtaccccatgccactctcagaggaaagaggatgaatactgggtcaaaccagggataattacctgcccaccacaggagtcattacaatgaggaagtaaattggcagatttgatacggccccagacccagtgtctgatgttggcctcttggcaatcagataagttatttagaataactgcttcatgagttgcttgagttgatgcatccaaacttgcccagtaagcctttctcaagagctggactaaattctggtaaatctggtcctcccatgcatcatggctaagtgagattattgacttccacctggcttggttcagccatagtggtgaagtggtgtggtatgctgtcttttaatcaaacagacatttagaggaggtcttttgggtcataggtggcatggggatggattgcacaaaggtgactgagtagttagttggctcaggttattatggagtgatcgtagctgtcccttggagagtgtctctattatgagcagtacagagtatactctattgcgctatattctttcaaaataatcttagtaatagcaaaagcatgtcacatgaggtaagttttgctcatgagtgagtttaggaatgctgtttttaaagaccatatgactataaaaaataatatagaagcaatttctaaaagaggagttcaaatatattttgagaaggagcaaaaaataaataagtatatatttcccaaatcgcctgccttaataggtacagcacccatctgcacgcatgaaattatatattaaataaaaatgtagtctcattacattacagccattaaaataactgtggtgcaacaaaatctaaactttcttatggctcccagaacagactaaataacataaatgttcttcaggcacaggcttgtgtggaagttcgggcatacactgtgtgtgtgtgtgtgtgtgtgtgtgtgtgtgtgtgtgtgtctgtgtgtgtctgtgtgtataactaaattgacttaaaagaaatcttgaaatttaaaaggattcctggttgtagaagatttatcactttgcagaagggtaccatgttatttttaaaaattattactattttttattatgtcatattgtagccccagtaggagttatttttcctttaaaggaatgtttggattaggcaaaaacatggattttaatgctgtattttaaactgtgacttagataattctcttataagggggaattaatttttctggatattgattggttgataattatttttaaactatgtgtctctgaggtacctcagagctacagcttaaaatttgcagctttatggcatttgtctaggatgtaacaggaagaaaatgaatgtgttaaggatcacatttggtgtatatctcaagtaaattcttgtcaccttttatggcaaaatagagaatattactgtatatagcaaaataaatcagttaaaaatctggagaagagggacttaccctgaattatcttggtgggtccttacaggagagtggtagaggcacagaagatgatgaggctgttgaactgtggaggcatagattagagtgacgtggtcacaagccaaggaacacctgaagccaccaacagcttgaaaaacaaggaaagctttctctcctgcaaccattggagggaccctggcccagctggcactttgatttcagcccagtgaaagtgattttgagcttctgacccccagaactatgagaggaaaatttttgttgtttttatgctcccccagtttgtggtaatttgctactgcatctccaggaaactactgcactttgtactgaaacaaatgtaaaaatagattgtaaatataaaataaaccaaccataagagaaaacactttacaaagagattgaaactttttttttaaaagaatattgttttcagtgcgggtgaggaggtaatgagacatgagctgagctatctgctgtgaaagtgaaaactaaattgccaatatggaacaaaattatgcagccgttggaaattatatttaaacaatatttaagtttaaaaaaaagactaccatttaatacacagacttaaaaatttacttacattgtgaaccaaattttaagtatctatttctagggaaaaaagtgaaataaaaaaatacagtctgtgaagttaattttcctttgtttaaaccttgcttttccacttagctgtgtgacctgagaaaatttctgaagcttttggggcctatgttctcatctataagatgaggaaagtaaaacaacatgtgtatcttacgaaggactaaatatattaatattttctaagcactcagggcaatgtctagcactttgtaaagttgcagtatttgttttttgtttatcataactattggaataaaatgtaaaaatctaggagaattctttactccaattacttcgaaaatcttttccttctttctatacctaaaatatagaaactggagctcccctttgaaaatggcagcttgagaagttgcacagacctgctccacagcaaaacaaacataattggtaaaaactattttcaaaaaaaaaataataaaattactggaaattgtcctacagacactcaacaaatgaagaaacatatatttaagaaaatctaaaacttggtcagaacagcaagtcctgcacttgagctatgacccactctgctatggtttgaatgtttgtcccctgcaaaactcacatggaaatttagttgccattgcaacagtattaagaggtgagacctttatgaggtgatcaggtcttaagggctctacagatcccaatgaggggaaaccatatttcactgggagagcaaactgctagcatttatcatcccctccagctttaagttacagaggctaaactcctggtgagtgtgccaatgtggtcagaggttctcttcctccacccagcccctacgcatagggcagagtttctaccccaggtgtggcaagcctagaatactggggctctaattgccctcaccccaccttgcttgtaaggtgcaggtctgtgcagcttctcaagctgccattaccttgcttgtaagggagagaagttcaacactgagaaaggcaagccaagaataccaaagactgctccccctacccagcccccagagcagtggctgagagattttgcccactgagagaagcagtctgtaagaacagagaactccaaaaaccctccccaaaggaattgattttatttgaagcacagtgtggggaacttcaagcctaaggatgctttcagaaacgagaggctttggtggtaagcaaataagagcccactgctagcttcttttaagagcagtaggctaaacataggccaactaattcacaaaagagaatcagagaaggagctaagaagagcgctccctcttgaggggtcagatcaaacctcaaagactggccaaagaaccccaccccctagtttatttggatgagactgtgaaacaatttatactctagaacattgttgaaaacaatagagcaatcagctgggaattggttgagctacaaagctgagcgggataccagatgaggcaaaagagagataagggaaagagacagagtcctgctaacatgacactgtcattgctggtaactgtgtgcatgcccagtgctgaccctccgaggagtagcaccaaaggcttcacgctgcaggagaaatagacttcccaaaatagtcaagttactcaacaaataaagcaacaaagacaagcccagagagggaggagaggtctcagtaaattcagttgattaaatacattacctaaaatgtccaggtttgagcaaaaatctgacacatgcaaagaaacaggaaagtgtgccccatacacaagaaaaacagtaaacaacaaattatgaaaggacccagatgtgaaatttaacagaaaaaacttaaaggtcagaggaaaccatccttgtagaagtaaaggaagatatgatacactgcctcatcaaattgagaatattggtaaatagatagaaattataaaaaaattataaaaaagaatcaaattgaaattctagagtaaaaagtataataacaaaaaaaatttactaaaggggctccacagttgatttctttctttcttttttttttgagacagagttttatgctcttgttgcccaggttggagtgcaatggcgcgatctcggctcactgcaacttccgcctcccgggttcaagcagttctcctgcctcagcctcccgagtagctgggattacaggcatgtgccttcacagcctgtaattttgaattttgtatttttagtagagacggggtttttccatgttggtcaggctggtctcaaactcgcgacctcaggtgatcacccacctcggcctcccaaagtgctgggattacaggtgtgagccaccatgcctggccagtagatttcaactggtagaagaaataactaatgagcctgaagatagataggtaaagattatgcaattcaaaagacagaaaaaggaatgaagaaaaatgaacacagcctcagagaaaaatatggacatcattaagggcactgacctatgtaatgggagtactacaaggagagagggaagaaaaaggaataaaaaaattaaaagaagtagctgaaaacttctgagatttgatagaaaacattatacactcaaaaagctcaacaatttccaagtaagataaacacaaagagacacatcatagtaaaaatgctgaaagataaagagaaaatcttaaaaagcagcaatagaaaagtgttattgcttaaaaggaaacattaagattaatagctgacttctcatcggaaacaatgaaaatcagaagtcagtgagtgggatcactttcaaaaagctgaaaaagaatttttaactaacaattttatgcaaaatgaacacatttccagatcaactgaacttgagagaatttgttgttaacagatccatcttaacaagaaatactaaaggaagttatttgggataaaagcaagtaactccagacggtaatttgaatccgcattaaaaacaaaaaaaacaaaaaacaaaaaaaaacaggaaaggtaattagttaattacaaaagatagtatagatgtgtgtttgttctttttttattctagtaactgattttaaaagaaattataaaaaaagtatagatttgattgttgagttttcaaaagatggagatgtaatatatttcataacaccaacacaaaggagatgataggtgatgcaaagatgtattggaataaggaaattataccacatgataaatccacaggaagaaatgaagagaacgaggaatggtaaataagattaacatagcaaattctgtctatatgcttgccattcttacttacctcagctcatttatttgatagtcaaataattctacaaagtaataagtgtaatggcttattttggggtttgtaaggtacatagatattgtcttacatagtatgtatcacaataaagacacaaaaactgggaagaggaaatacttgtactggaataacaattcattattttctttttttaaattttgaattgagatgaggtcttgctctgttgcccaggctggtcttgaactcctggcctcaagcaatcttcccaccccagcctccccaaatgctaggattacagatatgagccaccacgcccagcctggagtaacatttctgtatctcattggaataaagatctcctcacaaagaaaagtctccgtccaaatggcttcactggtaaattctgccaaacattttagcaagagttaataccaattcttcatgaactcttccaaaagtaggatagaacatgtctcagctcattctgcgaggccagaattaccctgataccaagaccagacaaaactttacaagaaaactacacagcaatttttaaataaatacagatgcaaaaattctcaaaaaacacttgcaaactaaatttagcagtgtataaaaatgactgtacactgtaaccaagtgagatttttcctaggaatgcaagggttggttagacatataaaaggtcaatttaggccgggcgctgtggctcacgcccgtaataccagcactttgggaggctgaggcaggtggatcactagttcgggagatcaagaccatcctggctaacatggtgaaaccttgtctctactaaaaaatacaaaaaattagccgggcgtggtggcgggcgcctgtagccccagctacttgggaggctgaggcaggagaacagcatgaatctgggaggcggagcttgcagtgagccaagattgtgccactgcactccaaagcctgggcaacagagcgagactccgtctcaaaaaaaaaagtcaatttaatacactacatcaatagaataaagaacaaaaactacatgattatttcaataaaaaaagcatttgacaaaattcaacacctctttatgataaaaaacattcaacaaactaggaatagaagggaactttgtcaacctgatgaatggcatataaacacacgcacacacgcagccaaaagactgaatgctttctcctgaagatcagaaagaaggatttccacccttgccatttctattcaacattgtgatggaggttttaggcgagacacttaggcaagaacatgagataagaggcattcagggccaggcgtggtggctcacgcctgtaatcccagcactttgggaagccgaggcgggcagatcacgaggtcaggagatcgagaccatcctggctaacacagtgaaaccccgtctctactaaaaatacaaaaaattagccaggcgtgttggcgggcgcctgtattcccaggtactcgggacggcaggctgaggcaggagaatggcgtgaacccgggagatggagctggcagtgagccgagatcgcaccgctgcactctagccctgggcgacagagtgagactctgtctcaaaaaaaaaaaaaaaaaagcattcagattggaaaggaaaaagaactaactctgtttgcagagaatactaccttgcatatggaaaaatcttaaggaattcattaaaaacctattagaactattcaacaagattgctggatacaagatcagtatgcaaaatttaattgcatttctatatactatcagtaaacaattgaaaaatgaaattcagaaaatatttctatttataatatcaaaaagaataaaatgcttaggaataaatttcacaaaaaattgcaaaagttatacactgaaaactataatacattgttgaaagaaattaaagaccaaaataaaaaaaaagacatctcatgttcatggatctgttggatatccaagtgcaaaagagtgaagttagccccctatatacacgtatataaaaattaagtagatcaaagacttaaatgtaagaagaaaaactataaaactcatagacgtaaacttaggcataaatcctcttgatcctgaattaaatagtagttgcttagaaatgacatcaaatgtgcaagcaacaaaagaaaagataggtaaacaggacatcatcagaattaaagatttgtgttcacatgacaccatcaaaagtgaaaagacaactttaatgggaaaatatttgcaaataatttgataaggagcttgtttttagagtatataagaacttcatcgtaaaaaagacaaatagtcccattagaaaattgacaaagtatctcagtagacaaatatctatgtacaaatggccaatcagcaaatgaaaagatgtttgacgttattagccttcagagaaatgaaaatgaaaataagatatgatttcatactaagttggctgtaatattagttagtttattttttattttttgagatggagtctcgctttgttgctcaggttggagtgcagtggcgtgatctcagctcactgcaacctccacctcccgggttcaagtgactttcctgcctcagcctcccaagtagctaggattacaggcacacaccaccatgcccggctaatttttatatttttagttgggacagggtttcaccatgttgcccaggctggtcttgaactcttgacctcaagtgatccgcccacctcggccccccaaagtgctgggattataggcgtaatattaattttaaaaggcagctaataaggagtgtgagtgagattgtgaagaataagaactctcatacactgttggtgggaatgtaaaatattacagctaccttgaaaaacagtctggcagttcttgaaaatgttacacatagagttatcatatgacccagcaattctgctcctaattacatacccaagtgaagttaaaatatatgtccatgcaaaaagttgtacatgaatgttcatagcagcattattcataatagccaaaaatagaaacaacccaaatgatctgaattaatagatgtgatataacaatacaatgaaatattatttggcaataaaaaaatgaaatacagatatttactacaatatggatgattcttgaccacatgtatgattttatttatatgaaatatccagagtaggcaaatccatagagactgaaaggaagtaaatgatcgcctatggctggggatttgatgggaaatgggcagtgaatgctaataggtatgtgggttattttttgggtaatgagaatgtcccaaaagtaactggtgatagttccataattttgtgaatatatttaaactatcaagctgtatgccttaaagtgaattgtatggcatgttaatgatatctcagtaaagctgttgtttaaacaaacaaacagaagctggatagcaccgataattcaccatgggtatgatttaggcaagaaagacactgaagggtcagcaggccctcacttaagagttggcctgactataaaaatattggcagatgaatgggtatttatctggttaaagttaagtgtacaaaatgctttcatgttttcatgattcactgctttaacctgcttttatgattaaccagccagttaccagtctcaactgtgctaagagacttctgctgtgtggttgtggccttggagctgagaatttcctggagattagattggaaagttactaatcattaagccattgataagattaaacatttattaagcacctattatgtgttaggcacatcaacatgtagtttcagttgttgaagccatgagtgttactttggtcacctagggagagaggggatagaatgagaagcatagaggactgagccagaaattcaataatgttagcctgaaaaagaacagcccagaagatgacagaggggaatgaccagatgggtgggagaagccatggaaaacgggatgtagaagtcaggacaaaggagtggctgtgaggaacgtcagctgtgcagatgctctggggacatcaaagatggtgcaaggaaataggaaacagtatgaagaaagcccatgcagcatcggggtcttggtgaacctgttggaactatgtcattggtaaagcaggggacagattatagttgatttgggaataatgtggatgaattataattaaaagaatttgagactgtataaatttaatttgtgtgttttaaaagtgtttcactcagaacttcattttctttccctgtactctttggaagtataggtgattttattttctaaaagcctttttcattttctgaatatcttttaatgagcgtacttttcctatgtagttagagaaaaaagttgttaggtatcaaaagatatgatgatgtgtgataaccttatttgccagtgtgttggaatgtgagacaatgaattctaaccaagtatttcacaaagaaattgctaaggacttctactaggctgctaagtaccttttctttgggatttcctttggtgctacatggaataaatactgtgctttggaaggttgtaatttcttggtaatcataaatgtctacatgttccttggccacgtacatgaaattattaaaaaccactctaacctttgaattttacttcttgcagctacggtaagtgacaataaatagaattgggccctcttaactaacagaattgaaacaaaagaggttgaaacttttggttgtcagctccttcttgtattatatgtaaggaggggtgaatgaggaagagtgtactgggtatattttgtataaggtgctatgatgaattaaaggtctctttattatatgtaaggagggatgaatgaggaagagtatttgctgagtatattttgtacaaggcactaggatagattaaagatctctttctctccaattctattgtaaaagtatatgttgaattctggaggaaccctggctaatttgcttttttaaaaaaagccaaatttggtgcacgatacttaggtttgacatgcaaaactaattgaaaaaagccgtataaaattttactgcagtgttagttgaagaatgtccaggagtggttgtgtttatgataacagtaagaattctggaaacctcttccagttttctccattatccctcattagcatggtgctattccacaagtctctcttctaccagggaactgcatcctgtccctcgcccctcagtgatttttctcatgtctatcatgtagatcactttagcctctcaggctgtttgcagctctcctcttctccattaccagcatgtctgcattagggagaggtgtggggcaggtctagcctcacatatgttttagctggggaaagaagaacattgacaacccatgttattttttattgtattcctttaacaaatacacagtaagtgacagtgcttcagaagccctgctttttaatctgtctggggaagggtgacctctggtggctaaaaccataagccccaatttcaagaaacaaaaagatttctttttactgttgtttacattatattcatatgtttatgttttgtcactttttataatgtactatatattcattagaagtaaatcagtgtcttctgccaccgtgtttaaatgcggcatcttctgttaatcatcagctgtgctctgtactcatgattggccttaatttgagatccaaaatatttccttaacagattattttttgttctgaggaacaagatcatttccttggcactcttttgttattaaaacttaaaacttctctgttggtttaaatgttgaccattattattataacagaaaaacagttttacccactggttaaaggaaaaaaaaatcaatctcaaactatgacgtccgagttatactcctggctactatttatctttgaatcagccatctaaccaacatttaattggcttgcttcctcagagatatttattcttaacttgtttagtctgccagtaaatgaccaccaaatcgtcagttttgtttttattacagtctttgctggtttgcttatttgtgcatcactttatttaaaaagagtttagggcaactaatttattttttgtaaaaataaattttgaaataaaatgtggcaaaaagataaagtatctttctcttgggattttgattatgataccgtatgtctaaattgtctcaaagttgatttcagttcatttgttttctagtatataattgataaacattatagtgacttgtattaattacacttagtgataaaataattcttagtaggtttttttccccccatgatccaaataatgttttattcaggagaaaataaaaactcattttattcaaaagccttggtttttaagtattttctgtgacagtgtaaatcttccttctttctcatggtttataagcccaggtagaggggctacaagaagcagaaacaaattcattccatgtaattgtgcttgttttcaatgaaagttctgcagggctctgtaggatgactttttaaaaccacttgtccggataagatggattctattccttttattccggtattgggtttttgtctatcacacatggaaatgtttttacagcctgtgatgctctgcagtgctgttactaatgccatagtaaaaatgctgagatgttgcagtgcaacagaaattcccacttagaaatacatgttagtcaagtgaataatatttaacttctttcttttcaaaccaaatagacatccccgaagttatcttttttttttttcctaaacttagattttagtagataagcagcccagattaacttctggaacaaagttaggacttaaaaagtatttcctcacccatactgtaccagacaagtgcctggttttggggctaggtaaataaatattttaggctttgcaggcaatatggtccctgttgttactactcaacttcattgtagcacatgagcagccatagacagtacgtaaatgaatgaacccgactgttttcaattcaactttatttacaaaccaggtagcgggccataacttgcagaccccttcaagatggtcaggaacagtgagttgaagcagtaggaaatatgatatttcttcttaaatatgtctgcagcttttactgctgcagctttcagtataaatgaagactctttacagttacgtaatgcctgagacaacaatcaaataagctttattttacaactagtaacttggtgccaaatttaacttgtagactccccctgccccatttttttttgaggtattatgagggtttgtgatactctgccagtacattgggttagatttctggattactttgattttgccaattgtcaaacctttaaaattccaacaccccaagatgctagattgtttcagtatttttttttctaaacactgccatttaacttggattctcaaagtatattttggctcatcgttacacgtgagacccatccatcctcatcatgatggtgtgaaatcagtgtagagttcttgaactcaatcagcagccctttgttaagcttctgccacaggcccagtagagttactaacaggatttgagcccaactgagggcagggtcagatttggtggcagtgtgccaggtggatcacagagaggtgtaagcaactataaaattataaggacctgagatgataaaggtttggaactattgctgttggcagtaagaatggtaagtagttggtggtctgagagacttaaaatagaggactagaaaatgcttgcctgcttctaaaggcacttgttaggtagggtctgcgggatcagagtgggaatgggagaacttgagaaaaagagggttaatagagatttcaatagcagccacacatgtaaaactacagatatttccatcatttttgaaaatatttcttattcagagtaatctaaaaaatctgaggagatgcttcaatggcttaatctgacctatatgttttgcttataaatatgtttcaaaatatcctgtttctcatcatcatgttagttactttgatgaaatacatgttttggtttacatttatgtgcatgatgtcagcagcttacagtacatgaaggaaacttcccatatcccagaagtagtgacttaggagaactatggtcttgagatgcttggaaattttgtatctggaaaatttaccaatcagggaattttccattgagcttgcttttttgaaaaggtccttcagtttgtagcagtttgttagcccagtttatcctttcttgtgatgagctagtcattttgcattttcacatataaaactttgaaatgtcttttaaaaagtttatgggaatattgtgtatgttattgcttcattttccccgaaaggaagtgggagaaatttgagtcattaatatacattaaaattctgtgtatgtttttcgtactcatagcaggttgttccaaatcatctaggtaacaaactttggaatgttgatagaaaacaaacttctagcactgtttgtatggagaagtatttcccaaagtcaagttctaggactcttgggactgtttcatggctgagtcaaaggttcccttgtgacatgtgaatttttaggaaggagaacaatgacaaatttttttgaaattgctacattagcatgcaacaaaaaattctgagggaaatgtttcctggcagtttttttattatatttacctgcaatttatagcttaagggagttttaacccatgaaacctccaaatctattaaaagtgaaaagagctagatagatttcattagcatgcgtaatgcccagtttccatacccatctataatcatttaaagcaggaatcataatgggaatatgagctgagaaattctgttgatgtttgaaatgtctggagtgtcaacataattaaacagcgtatgtacacaattggccctgctccaaaaccagtgattatgtgtctaacatcaatccccatgtgtctacaaagctgttagagtaaacatctggaatcttttactaccaaagctaaaatattacataatcagttaaaagaaagagcttcctacccacagaggtcctgcagagagcaatgtatgctgtgatcttgttttcaagcaggcctgtcttctttagagtagcaactaaatatattagatacttcaactatccttgaaatgtgacttttcccctgaggtaaatactaaggatggtttaaatgttgctaaatggttcagctgaatcataaatactctgtaatgagaccagaggggatcaagttgatcagtgggagaccacattcttaccaaaactgaggctcagctctcaggccatttcaaggtatgctggagttcctttgagcaaaagaatttggtattttctcatgtatgtattgaagcactaagtaaaaattgtgatctttcaggtcataacagaaaacccacaaattgttttatagcatgtttttgatttcacaatataaaatgacaagaataatgagatcttccacatctttttatatttttccactatatttgtgttaaagcttaggtattattttcattctttcatgctaaaagcacattagcattttctagaatgtaagtggttttgctagaaaaatgatattaatatgattatccagattgttattttggagggaaaaaggaaataagttctgcaaacactgttgggtttcttttttttaatgatagaggcataagatgaatagtatccatcttcatagaaagaaagaaacgtagagccaagtattgaaattttttaatggcatatttctttgtggaggtgaaaactgtttctttgcatttaatatgcacatctgccttgtccctgtcaagtttgccaccttccagataaaggttgaatgccaggactctcaaatcagcctccactcagatctcagctcccatctcctaccagttgtattgtctccaactagttcacctttctgagcctccagggcctcatttgtaaaatggggatgagaataaaaacatgacctcagtggattattctgagtcgttgtatgtgcctagcaaagaggaagcacttggatctgctggtgccttctccccaccaccatcatgtcgaccagaccccagcaagctagcagggaggtggtggtggagtggggagaaagatgttccaagcagaggaagcaatacatggcagggcagggagatgtggctgcctcacaaaggtggggagtagttgaagaacgggctggagtgaggtgggcaaatggtaagcacgtggcacactgttcaactaagataatcacagcattagctgggatttgggggtgaaggagtaggagtgaggggagatgtgtcaatgtccctaagtccacaggggcaggacaaaatagccctatggtctgtctaggacagaggtgttcaatcttttggcttccctgggccacattggaagaagaattgacttgggcaacacataaaatacactaacaatagcagatgaagtaaaaaaaaaaaaaaaatctcatgatgttttaagaaagattatgcatttatgttgggccgcatttaaagccatctgggccgcatgcagcccgcaggccacatgttggacaagcttgatctaggatttctatcattcctaccacttccaaaattaaactcattcttttcagtgggaatgactaagcaaataatcttaggggggagaaaaagatcattattctttctgacaggctaagtaactcctattccttttcctccagcatttatttcccatatttcgaaattaaggaacctcctactttttacatcctagctagaatgcatgaggggaaatcaaacaagggtgggataagatccaaacacagcaaaattatttattacatcttttccatgtaatgtgcctattaaaattcatgatatttaagctacattaaaaaaaaacatctaactaaaaaacaccatacagcagattcaccaagtgtagatgcattctcattggtttgttgtagactgcttttacctttctaggtactgtttgtcatagcatttggtttttaatttctgtgtgaattagtcactatgaactatcctatttttggtattatggtgattactctggtgttgccctataaactttaatagacgtttttccagttgtccaatactactggtaaaaattattaatccctagaagtaaggttagttaatgaacttctcttctaggctgtactaaggcactgacccctactctgtggaaatggctttccaaccagttttactcttgtatgataagttgtagggtttagtgatagctagtccctgtcttcaaagttggctgagaagaatgctacttcggctagaaacagaagaacttcttcacacagttaatatttctttaaacaaaatgaaagtgtttattgtaagagaaaaaattttaagcccagaaaatactgaaaagatgaaattatataatcatataatataattatatgaaattatataattatataagtatatgaaattatataattatataatataagtatatgaaattatataattatattatataattatataattatatgaaattatataattatataatataattatatgaaattatatataaaaattatatatagtgtatatattttatattatatattgtatatataattttatattgtatacataattatatatataattttatataattatataatttcaccttttcagtattttctgggcttaaaattttttctcttacaataaacacttgtttttttttaaagaaatgttaactgtgtgaagttcttccatttctagcccaagtagcatataatacatatatcactatatatctgatatatatgatatacatcactagatatacaatatatgaaattatatataatataatttcatataattatgtattatataaaatataataaaattatatattatatattatatataattataatcatatatgatttcatatatatgatatatatcatatatttcatatatttttatatattatatatttataatttatatatatataaagccatccatgatttcactcctctgagcataagggcccaaactcagtctaaagggcagataccatgacagcttcttcattttagcttttttcttcagctcaaatccattcaagaacaacctagtttactcccagtgatcactcattcatctctttaatattaatctacatctgggcctctcttgcttaaatccatgttcctcgctaacttctggataagatcagcaatggcagagacgctctgaatattttttgtgaatcatatctttataattggagggcacatcgggggaaaccaatggcttctgtttctgtttcgttttgttttgtttcatccatcccttcaagaaaaagagaaggcttctgtttcttgaactgaaaaattcttaccaaggaataaatagaaaagcatttaacaaaaatttaagctattcttaaaattttgatacttatttcaatatttattattttttagaaagttatttttatatatgggccatttggaacagtttcattttttaaattttaatgtaagatgtcctaatttttattttaaaagagccaagatgactttgagactaatatttaatatttaatatagcccagaagactggtaacttgaattttttaaaaagtgtatgtctggtcgagcgcagtggctcacgcctataatcccaacactttgggaggctaaagcaggtggatcacctgaggtcaggagttcaagactagcctggccaacatggtgaaaccctgtctctactaaaaaaataaaaaataaaaaaataaaaaattagccaggcttggtggcacacgcccagctattagggaagctgaggcaggagaatcacttgaacccaggaggcagaggttgaagtgagccgagataacaccactgcactccagcctgggcgacagagcaagactccatcacaaaaaaataaaaaaaaaacaaaaaactgtatgtgtattaccctaggataaagtagtatctaagtgataggaagttggtgttttccttttatatctcagagtttatctaattttactattaacagtattggttggttgcctaataatttgtttgaaatccccttcttttattgtgtgaaaaagtctacccagggactataaaagccgtaaagattaaattcggataattgcttgacagtgctgtacccagggcggggcagtaggaagaggcagggtgggaaacagtgtctgtacagaatttgaaaacaataaaattaagagtcctgaaagctgaccttccttatcaccatggtccagatattttaagcaatatcagtgataagatactcttttgtcacctccgtggatctttgtcactgccaaacaccaccctcactccctttggtacactctttaaaaagtaaacgctatacaaataagtttaaattttcttacaaggtatttcatatagtttttgtattttgtatactttttagggcatatttagaaagggggtagagtttataattattttactaccaagatcccattttattatacttttaccaaaatcttcattccatttttaaacattttattaccaaattgtgtttagttaataatatttttgtttttattatttgatgtttataactagcaatgagattggcatagaaacaacaagcttagcacagtgaattcaggtagttattttcacaagcaaatatatttcattgcatggatagcctttatgtggctggtgggccttcatgacacttttgttaggaggtgggtgctaaagagatacttgtatgagatgcagggggaagcttcagaggagtggctgtgtcctgaaaccaagagcttcccctaaagggtcaccacagcaagcttgttttctcagtcagagactaaaggaaaattgtgccctagccagctagcctgagtgtgaaacaatttaaaggtggagagagggagaaaagcaggtatgtattaaccaaggccagctcaattctgggactgggctgagtgcctgtgctgtgtgtatttgcacggcatcccctcctctttggtgtgttgtctttctaccctgtacacacccccatcacagtcatattgagttgggattataaacttctggagtcaacacacaggttgcacgtgttgtgtatgctttggatgaactaatggcactgtgataaaatagtttgctctcagaccctactgttttgtacttttattcttagagtgaagctttgtttcatgatcacggtctcagagaacctcagtccctttggaaatagaactgactagatgaaatacaatgaagaccacaaaaataagctaaaaactgtagttttgactgtttccttgaaagtattttgcattttcatttatgagcaccgtagatcctgcaaatgtacttgtgtgtttttatactttgtgtttagaacctcagcttctgaggcatactggaaaggccaaaactacaaaactagatatttggcttttaaatgtatcttcagcatacatattcgtcactgttacccagggcacatttgaaaaactccaaaaaccttgtataacctactctttaattcccaagattaatttgggaaaataaatgctttgttttttaaaatgttcttattaaaacacacacacacacacacacacacacacacacacacacacacacacacttttaaaagggaacatatttaatttgcttggtttccaacagatataagtagtgctcagtgaagccctagctcccagtgcacaaaactaggacattgtttttgttggttttatttaatttgactttagtgtcctcacaatgaattttattgccctgataaattactcctttgttttcaaagacaaatccttcctatcattcaggtctgtgtcagtcttttctacttagagctttgtggtacatgcacagatatttattctttctacataagtgtaggactttttcccttatttttctagaaaatgtttatatttctaaagtttgcttttgaattctttttttaaaaagctattttaattgtttcacagtgtgaagcattagaatcacagaactgtaaggaacatcatggatgttccttgtgattgggaaaggaatgatccacggcagtgagtttcattggggatcctactcctatgaaatttggcatactgctcaggtcaggttcagaaggtgaattcttaaggtaactttcacagcattgccagaagaattagcttttgctaagtagatacgacagtcttcattctgtttttttcttaggcaggtggaacgtgatctctctgtctgctgctcatagttcccttgtgagactgggggggataatagcaggtccaggtgggcagagttctgatttcagtggtagactcctattgaggctgggtgttagagggtggagggcttgggacttgagttctttattcagttcttgtaacttaactcttgagtagatcagttaatcttagctgtttgctgttttggtgggggcgggggtcggtgttgcaaaatgatagtgttaaatgccttgcctaactttgtaagttatctaagacttatcaacactatttgaatttttcagagaaaaaaaacccagaaggtgttatctcagagttgtaattaacctgttgcctattgcataaacttcgtggtacattaacagtaccagtagttggtgattcccatgtcgtcttccattgatttttctaataatatgaattttcattcaatgtttttgccatgtttcttctgaaagaatcaccctgtgacctgggagttgaggcgaaaacttttgcttttacttgttatttactttttgagtggatctgtttaaataaaaggtataactaatggcttaatgtaaagaaattaattgatttgcctggatttaatgaataaataactttagacagagaaataatgtttgtcttttttgtcttttctacataatcatgtatgttactgaatgtctgaccctggtaatactgtaattaacatagagcttatgaatcatatcatgtatttaaaattaaattatgacttcattttcttgactttgattaatctctcagcgccatttatttgagcattaagattcacttaaactgtggttcttttgttttatttttaataatctttttttgcctttttaatggttgaatcataactttaaatatattagtattattgacttttaaaaaagaaattaggaaattgtttatctccttaacataagatttttagtgtgatagctaaacgcaaataattggctccttgggttggaaccagaaaatttcccaacttcattcccttatcattctgccactagtaagtaaattttgagcagtggaaagacttccaaagtgggctaatatcagtgaggtaggacatgcggtgaaggttactggggggtaatagtggccgaggggagtggtgaagtggcatcttacccggaggaggaaaagtattttgttctaaagtttggaagaggcaggaaagggtaggaaatgttttttctgacgggcttgtgccacaaagtttgagaaccaggtcagtagaacctgcagctcctgctagtgcttcagttgaatagttacagatagatacctcttgactctgaaaacatctgtcccatgccacactgctgacatctttcctaacaccccactttacctggcctcctcagtggtaacttacttagtccttgaatccttgcttcccattttaatagcaaggtaactgctgaccctttcttgaactgtggctttttcctgttttctgggcattgaatatattcatataggactaacatgaatatttgagttcagtttgttagactatgatttttgcgtagtttattcttattttttgttagtattcttatactaacaattatacatagttttttttttttttgagacagagtcttgctctgtctcccaggctggagagcagtggcgtgatctcagctcactgcaagcgctgcctcccaggttcacgccattctcctgcctcagcctcccgagtaattgggactacgggtgcccgccaccgcgcctggttaatttttttttttgtatttttagtagagacggggtttcaccttgttagccaggatggtctcgatctcctgacctcatgatcctcccacctcagcctcccaaagtgcggggattacaggcgtgagccaccgtgcctggccagtatacatagtattcttaatagtttatttaatctgtcctttctgctgaatatgttgttatctatcatgttgaaacacaagctgagtttttgaggatttcttatgttttaatatatacagcttttagagattttcattctttcttagaggtctgtactattttgcttcttcaggagctcagttggattaatattatttccaatttgtagaattttaggtaatcagaaatgcatgaatctccttggctttgacactgagtgattgtataacttgaacagtttatcaactggataatacagttaatttaatgagtatgtactatgttcacaagactaggaattgtaaagaagtggggaaaactctgatttctagcttaagtgatacctaaagaagcagagtgggggggtgtacacacccatatatatctacatacataaatatatatatatacacacacatacacatatatctacatacataaacatatatatatacacacatagtaaaatactaaattccaagcctagatcagtcttaaaatggaaacataggacaatatgacacgaatttgtataataatgctaaggagatgccatttaaagtataaagtatacttaaatgagttttatagctttatgtcacatctctgataatttgatatattgtacctgtcttagttttagatgcaaatttcaaattttgctggatagctctacagaaatatgtattgtccttacaaattcaaaatacccaaaacctaacaattgttttatttatggcagaatcatactgagaggatgaattgctgatgattgtaaatgttttggacttttcaatctgaatttaaaaatgaaacgaggtatatatttgtttaatataattcttttctgaaatatagttataaatcagaaaggtttggtttattatttatccagttaaaggggagagcatggcaatttaaggatttgtcaactgagaaaataacacatttgaaggaagggttagaaaaagagcacctgctgtgttgtgttcactctgtatattcccaagcctaggagtgggagataatgttaatcacagcctattcaggcctatctatgggtctgggttgttttgttttattttgttttgttttgtttttttccataatctaagacaagttattcagatagataatttataaaccagaatctgaaaatggcttgaaaagtctgcattgtttactttatgaattccttcgttttggttttgttagattccttacattctttttattaaaacctgagtttgtagggtggagcatgtcttctttcctgatgagattcagtctattttgattaacttgtttttagggagtaaaaggctttgcttaagtgataaggtgttaagaaatgtgtcaggataattttatactgtgctgatttttttttcatttctaagctacattagatattttctttgcaattttctgcctcttttataagtatgatttacttgagcatttgctgtccctgagcatttttaaaatatttataaattatttcaattaattgttttatgaaaccacaaattgtaggttagaacaatagcattttttcttgagatagtgtgttgggatatatttaagggttttacagtgtgatatcatattcacagtagcatcaattagtggtaagatttatttcaggagtttaaatcaatactgcagggcttttctgcagtactgcttaaaatactcgaatgccaattttattgcctctgggatcacactgacattttctcattagtattgtgcccattccccccctagttaagcataaactctgtttgtttccgtcctgtacaattagtgcctatattattcgacaaacacacatggttcacccattctgtgccagccactatgctgaggggttccagaggtaataggacaatcagaggagtagccagataaccactttgatatgaaacaaaactacctaatgctttgaaagcacagggagagtggccacctccacaccaaaaaactggggaaagctgcctgttgaaggatgtgcaaaaattagcagagaagaatgcaaagcatttaccaaggaaggagagcagcatatgcagctcagagatgcttgggagagtgatagattgagagaacagaaatgtcttggcataagggtagaggggaactgggagagttgcaagatgattaaggggtagcacatcagtaacctgcgcagagtttggattttatcctgaaggcagtggagagccgttggaggattctgaccaggggaatggaatccagttttatttgaaaaacatttacctctagcagtaatctgcaaagtggatgtgcaaggagggagacaggatgggaaggcagggagatcagttagcaggcaattgcagcatgcagcagttttgttcctaagtacaagtgctcaaagcagcgttatttgtaatagacaaaaaactggaaatccaattgcctatcagcagtagaatagatgaataaattgtggtttgtttattcaatggaaatctctactgcagagagaaagaatggacgattgctatgcacggcaacgcagatgaaactcagcaaacataatgtaacgccaaagaaaccagacaacattacatatgatgcagtccgtttatagagtccaaaaacaggcaaaactagtctgtgatgataaagatcataataatagttgcctttgagggagggtgttgggactaggagaggggcttttcttgatcttcgaggtgattagacgagtgtgttcactttgtgaaaattcataacttaagatttctgaatttttctgtatgttatactgcaattaaaatgtttctttaaaaacctagttatctcaactgctaggcatgaacactgtcccaatactattcccagtcctcttctatctaaatagtcactattgccatgctgctacttcctcccactttgcagctcactaaggcaggctggagatttttgtgactgctggagtgatttttgccagtttgcttaacccatttcattccatgagtttcctggcagagattccacaagcaatctctgccaggatgactgcttgtagcagtgcttgagttttggtttttactgtgaaattgtaggacttaaatataaacacatagtggaagtcagatatattaatgaaatgcaaatatatttatgtaagcatagcaaaaactagggtttttccctccttaagcatgaagtttattttggaaagtatgttagaattttatacagttaattgattcagtagctgtaccctacagttgagctgtttatattatcaatgtactgtaggttaggttgtatagctcattcattctgactgctgatgactatgtcacattcatctacacctggtgatgtactttcaataaaggacagagaccaggcctaagctcaattctatatgtagaatactgtaaaatagagtaccactttaatcagtatcactgaaatttacaataaatatcaggtattttgccctggaatttcacaatgcacatcttaaacttagtatctgtcttctccagtagtatgaaacactcattaaacagtatagcgcctcctggattatttaaagcccaaaactttcccaattaattgcagagcagcacacagtatctctttaaagagaatgacaactatagagagtatgaagaataaagtatagctgtttggaacaaaagcattatttgttttattacagtgaataatgagcctctcttcaaatttggctacactgaaagatacctgttactttgaaatatcaccaaaggatgtacctatttttgcatttcatctagggacttaattatttaattggcttagattttcttcagaaaacaaatagaacaatcaaaattattcttaacccttagagattaggaaaaaactaactgccttttcaaattgtttgaatggacactttttttgttctctatgaactgaaatagccttaatttaacaaagactcatagggatcatgcatgattggttttaccaaatattatttttggcttccatatccttaaagcatttaatattttatcaactgaataagtatagtaaagaaattttaagaaacattaaagttttctgctttgcctgctgtgctcattaaattttaacattgaagtccaatagaagttttgtagtctagcagccactctgactcatgagtcaggggctcaaattttccttaatcttacatatttgttttattaccgtttcctcacaaaattattttattttgtctttgaagtatttccataccaacttagctttaaaaatgtatacctgcaaaggaatatgctttgatatgtgacatttggctctttgaagccaccactgtagtcctcacaatggacaatgttttgttgaaaagttttcacatttactttattgtaactatagaaatgttcttgtttgtcaggatttatgggctcaatatttacaataccataaatgagaagtccatagtcatcttggtttcatggataaaaaataaatgtctttttatcccctattaagtagaatggtggatttcattgcaaaatgttaaatattaaatatgtaaataattcaagtagtttgatttttaaatattaaattaaggaattagattcattatacctgaatggtgactggaaggtaacgaacttaatttgccatctcttacgtagacaaaaagtccctaatcaggtggcccatacctattcaggtgtgcagaagaaaagtgattctatttttggcagacagattttaatggaaaggacatagatttgggcgatcagataacatctggattcagactggagctctattcctgctttactgagatgagagagactggaaggagcagttttcaccaggaacctcaggggttgtatattcctaagtctgatttgaacaccacctctttcttctccttatttctgtggcaacaattgactaaatttatatcatttggtttagtagtgttggaaattataattcccatggtcacatttacttgattactttctctcctaagccagaattagtgattacaaatgtccttgcaaactttgctaataactttatttcatgaatagaagtaactgtgtcactagtggttctgagtgttagatttgcatctgccacttactgggtgggtaaccctgagtaagttactgattctctatgcctgcatttcctcttttgtttaataattcatgtcacatagagcaacagatgagtattaaaaggattaaatatctgttctgccttggtgacagccaaaaagatttaaaaaattttttaaaggattaaataaaagggtgcctgggcacagtggctcagggctataatcccagcactttgggagatcgaggtaggagaatcacttgagaccagaagttcaagaccagctgggcaacataaggagaccccatctctttaaaaaaaaatagtatttatataaaacagtcaacattgcgtctttcacatagtaagaattcttgttgctagattcagtaaaagcaaggtgttaccatttggctagttagttttcaatgaaggtaccaatgtgtacctgcttaaggagaaatatcacagatatagttatacttaaatctaccttaaaatatcaccaagttttcactaattttgtttttccataggagtgtattatactcactgtcagttttctcatgatttgtgaaagaaagccatgaaatagcacatgtagtagaaagcataatttaattgatggcagagttcagggattttcacatgaagactttgagagtgtggtctctaatcccagttctgagagctttaacgggagttaaaccatcatagaacttggcactgcacacatgcctcagatcatctctggagggttgcaaagtagtctgggaacctaacagaaagtataattgcaaaacagatggctttttatgttcctttttataatactgcagcaagaaatggagcccaatggtatattatttttatatttcttatttatgagattttgtgccaggaaggtcaaattgtaaggtcccatattgttccaccttccataaacatttaagaaaattagcaagaacagaccacacacagttttttcttgctaatgttcttatatcaataataactcattttatgatctcttttaactagaattcttgagaggggcaactccctcaacatcttctgtactgggccctttaatatatgtaaaacttaatcatttaatttcagttttctgaataatctaaagtagttttgtgcaaagactggctctgccgtcacctgtgcatgggaccttgatcctgtgtataacctggccaggcctcagccttctatgttcagtgaaatgactgtactagttgatgaccagtgggctgccagctatgaaaggcgagacatattaatgctttgaatgaaactatgtcgacttagctggtaactaccgtctctagcagcagagaggcctggacaaaagagcaccagcaggagatccacctgcctgggtcccttcagggctgccctgccatcaggggtcagattgtaggcatggcttcaaagacagccacactgtgaaagtttaagagtttgtagtacttactgaccctggggggtacacagcacgcctggaggccacatgtaggtaggtcaggttgcaagcaggtagagagaaagggagctggcaagtagcattctattttgggtaatgaaatgtgagtcacaggcagatgccgtaagggtccatttaaaggaagcggctagaaagcaggaagcccagtccatgaggcaggagagatacctccaagtttttattcctggccactggctggaaccatttgggtaggctgtagtactggaaactatgtcaagggcaattgagccgggttgacttatatttaaaaatggatgctgaggcagcataaaattaaaagcactcactgtgcactgtgctgatccatttggtttccgggaactctgaaatgcataaccttttacatgcctggagaaagtaccatcattcacccatccctgacatctctaggtatgagaagctgacagcttctttagagccttcaccaggtagaaccaaatgtatttttgagtgttgctggtaggcttatgacttgggaagaagaatatagcaaggctggagtggtagagaggagggggaaaaaaagaaaagaaagatgcatatgctgagaataatggcatttgtgtggaatggtggattccagttagaggtgactcagggctactagtactggagagattgggcccatcaggaattgtcttgtaatgagggctacagggccattggaagccctgaccaagactgaattgtacatttctgtgtgttgctctccattcattcctttgcactattttcatttttcatacctcccaagtggctattttttcatgccactcatggctctctctagcctctctgtgccttcttcctctctcacctttttgtttttgttttgttttttgtttgtttgttttgttttgttttgtttttttcagacggagtttcactcttgtcgcccaggctggagtgcaatggtgcattcttggctcaccgcaacctccacctctcatgttaaagcgattctcctgcctcagcctccctagtagctgggattacaggtgcccaccaccatacccagctaatttttttttgtatttttagtagagacggggtttcaccatattggccaggccggtctcgaactcctgacctcaggtgatccgcctaccttggcctcccaaagtgctgggattacaggcgtgaaccactgtgcccagccctccttcatcttttttaaggtatggtgttctgggcttaaaatcccaagctaaatacttgccttgtaagtgcacttctgtcagatagatgtcacagaagaattcagtctaataagcatgttcttgtgtttccatggggtattagaatgattttacaaaacataacttggaagggatgggaagaaatgactttttagtggtgttggctagtaaattagattagtaagaggaattattctgaagctgggctaatttttgagatgagcctttgattattgaaaacatatctcttagttttctaaaacaggtaattttacataaagattttgtttttccttgaattacaattactacataaaaatcttacatttccactgtgaactttaattgactggcaaaaattaacccaaattgttaatttagaaataagtgccatccttcagttattctgcagcatattgtactcccaaaagatttccaatgctgttttatgcaccgttgattaaccctgctgggtatgagagaagtctctacttcaaagtcatagagctttaacattgtatatggtcgaaaaaatataattgtcagtaagctatctggagctgggcttttaataagaaactcaactgagtgcccttgtagcactcagtgtaaatttgatgctcaatgaaaaactaaagttactagttatattcatttgaaaagtttatcctaaggaaaagacggaattcttttttttgttttttgagacggagtctcgctctgtcacccaggctggagtgcaatagtgtgatatctgctcactgcaagctccgcctcccaggttcacaccattctcctggcctcagcctcccaagtagctgggactacaggtgcccgccaccacgcccggctaattttttgtatttttagtagagacagggtttcgtgtgttagtcaggatggtcttgatctccagacctcgtgatctgcccgcctcggcctcccaaagtgctggaattacaggcgtgagccaccacgcccagccaaagacataattcttaatagaaggatcagtattctcataccaataactttaacttgattcatagcatgttttatactagatgtgactgaaattttaaaatatgaattacaatttctaatatctgcttacaatttttgaatgtgctgctgctctaggtatgtggattagtaacctaaaatgtctttattttcagatgctcttattagtataaatgtttctgaaaatttgcattgctattgatttgtccttccataaaaaagaagtttatactttttaagttagaactttcacttctgtcccagacctaactcttgaattcaaactgtgtgccgagccctgtactagataaggtacaatttgaaaagacattatttcatgccatttcttacaaatgctgcttggaaaaatatgcgtcttgactcaaatcacacaagaggtagtagactcgggatttgaaccttggtgcatcttgtttccactaatcaacattgtctcaaacaaaatgacttattccagaaagtatattttaatagtgtgaatttaaagaaaatgcagaaaatctccaagaaattttgctttgtatttaagacaggagttaaaattaatgtgtatgttcagacatattttatttaggattctgtagaaataaagctggatgtgattttccaaaactgaaggaataattcattgatgctgaaaaaggaacctgagcatcagatgctcattttgctggcatgtgtttttcatagattctttgaattaattaattctttgcagtttcttagcatgatttagcacctcttttctttgttttgaaatggcaagtttgtatatattatctgatcgttgtttattgacaaaaaccagtttccaggtgattaaagataagatttcttagggtggtttaggacattttaaaaaaacatttattgggtacagtgaatccttttgggaaccctagccttatttattctttagtttctgtattcagccaaatttcaaatatgtgtcccaaattactagatttttttgacactggaaaagttatttaaactctccgagactcacttttctcatattgaaatgagactaatcatatctaacttgatgaattatgttgtgaggaataaatgaaacatggtgcatggtgcctaacatgtaataagtacttgtgccatttatttccacaattgccaaatacttaagtgtgtaatatttgagagtgttaaatcactgggcatgtgtgaatgctggcacctgaaggtaatgaatagtagaagaaagagcatgagcttattcaatttaataatgaatattcctgttagtttttggggagtttctggtcacaacatttttagaacccatcaatacataaccttgctttatgtgtttttttctgtttaaagataacttatttaataaacattaaatataaacatttatatttaatatgcaataagtataaatattggcagaccaaaatttacccaaatcgttaattcagaaataagtgctattctttagttattctacaaaatattgtactcccaaaagatttccggtactgttttatgcactgctgattaaaacctctgggtatgagagaagtctctatttcaaagtcacagacagagctttaacattgcatatggttgagaaaaatataattgtcaataaactatctggaggtgggctttgaataagaaactcaactgagtgcttactgattcattaacgttgaacccacacccaacagcactataactcatgcctaaacaaagtttacataatatatatgttttccccatgggtcacctcacagccttcttgcctcagaaaccctggacaccacttcagcactatgcttgggggccattttaaatggtgaaatcccaccaacaaaactcacaaaaaacatggcaccaagtagactgagaaaggacacatgttgacagtatgagagctgaaacacaaaggcaatgtcaccttgttcagtctcagctgggagcgtgtgtgtcagctaaaaactttcacaccctgtgcgtatccacaaataaccctgaaagcaccacaaatagtgatttttgggattacaaacaaatttttagcaactaggtaggtttcacaaatatggaatctgcaaataatgaagattggctgtaattcctttaagaaagcattgatcttgaggtaatatgtttccacaaatgcaaatgctcaattccaggaggatattatgacaataaatggttcttagctaaagaatacttgttccctggtagcatgttagtgaataagcctagtgcttcattgtaaaaactattaaaataatagtgatttgcatctggaaacctcataatgaagacaataactgaactatattaaaacctttgcagtagagccttctatctgcatcactgtttccatggaaaaatatattccaaattccaattggagtgtccttttgcttcctaggtctttagtctgaacgatgaccaatccaccacacgcacctacagtgtaggtcttccattttactctctagtctggttctggggctgggcatagaactgttggagttgatataaagatcagggttacagctcctagagtggagtattttgggctgagacgatggggttttccagatattggatcatgtcatctgcaaagaaagacaacttgacttcctctcctcccatttgactacactttatttctttctcttgcctgattgccctggcctgaatttccaatactatgttgaattaatgactcaatatatgactaaaagttcaaagtgaaacaatgataattcagataggaaaatatgtggcagtatgctaaagtctaaaaaggaatataaaacgtctgtgagatacctaacatcagatttatagaaacagaatagaatgtaggttgttgggggctgcggacagggcgaaatgggcagttgcttgtagaaggggtataaagtttcagttacacaattatgagtaagttctagagatctgctgtccaacatgatgcctgtagttaataatactgtatcatgtacttaaaaatgtgttaaatggatagatcttatgttttcttccacaattgaaaaaaaaaaaagtcctatagaatcatttgaaatgatgggtttcttggtggcaggggggctttaatgagatctgtaccctttcttgcttgatttcccaagtttaagatattttaatgaataagaaggcactttaaatagactttaatccagcttttacaaaaatttaataaagcaatatattaatcttaggccatttttgataccttaattttatcccaagaaagaataaaacatattctatttttagtaagtagagtgcctcgcagaagaggaaacaagtcagaacttttctgttttcttaaatgttctctagattgggcagcatataaaactctcctttgaaatttagagtgcacaccagcctattaaagtctcagagaagtctagctgtaaaggaacttgtttaactttatttactggctttcttaacatttctttaactttggaagcctttatccccaggaactttaacatctcacaggccctcataactgaggagcacagttatggaatcagcttgtcattgccaaggtggccccttctttcttcatacaggggataatgaaacctatgctgtgtcatatgcagagagctaaagcaaagtgctaggagattaatgttcagccaggcctttcttgtttttaggatgacaaaaaggatttgtgtaccttctctggagaaaataattaggtttattctccttccccttgcatgtgttctgacttacctatccaggtgaccagatggcctagaactgtcttaggtcttttaaaagaatgtgcaagggactaagccactgtttgtagtaactactgttttacaagaaaaatttctagtgtttttaaaataagcttttaaataagccattaattctgaaataccagtgccactgtaaacctataaacaaatccaaatgttctcttaattaaatcaatgtttattatatctcatgaattttaacaacaaagacgtgggaagaccacaaaacaatggacaaacaaaaaatcagattgattagagaatttacataggaagagttgagagtttttttaaacccacaggaaaaagaattgtgatcatttttagcaggctagtaacattcttatcgatacaggaaataaagaatatttggtttgactatatgacaaagtaaaaatttctgctttgcttataatgcagccaaatacaaaatcaaacactgggtaaacacagcaagtagaacaaacggttaatgtttatattttttgaataactcttgtaatttaagaaaactatcaaacccagttaaatgagaaaaggataaacagttcacacatgaggaaactgttggtcgtcaaaggaattcgtttcctttgactaagattttttacccacctgccctcatgctgtgcctggtgttggcatttcagcgggaagacactctttgtcctgtggggagagggaggcaagggacacatttaaaacagttgtcaagacatcatacatgagaagagagaatgaaataataagggaaaaaaatattaggaaggcagacaggtagcagtttttttgtttgtttgtttgttttaaatcaggaatgtgagctgagtaagatactttgacaactgttcttaaatttgttaatagtattggcaaaacactgcacactgcaaagtggttcaattttattgataattcctaaaatgacaaactttttttctttagttttgcctcagaaattatcctaatgaaataatccaaaaagaaaaaaaacaggacagaaaaacagcgcatatattgaatagggcttggcaactaaataggaatttttaatgtaatggagcatgagttcatgattaaaattatgataaaaatagttgtaacatgaaacactgtcatgataggtgactgtagttgcatttgtgttgcttaattcatttctgtaaaataagcctgtgtacttcagtaagattatgatatgttaaaatttgttttgtgtaatacttacatacttactagaagaaatgttgattcattttattacaagtgattttttgcccttttttagctgactacacagacttagtcttctccactccgtgttcctgcagctagagacatgacctaacaccctgatgaccactctcagggaccttgagtgactggccggtgcaccatggaacttaaagtatgggtggatggagttcagaggattgtttgtggagtcactgaagtcacaacttgccaggaggttgtcatagccttagctcaagcaataggtgagtgaactctgtgggtatctgagaaaagtacattgtgctttctttcgttgtatgtgtttgttttaaatatagatttctaggggattttgttcatttggttccataataagtctcacaggcactcttgtacttattacagtttgcctgtgtttaggtacatctgtgatgatgcttgttctctgacacccctagattttactaaccctgagttaacatctacactgccttctcctctcctgttgttcagcctaaacagtgacttctgaaactaaagatgtttccatgagccaaaatttagacccagattaagaatttagattcttagttcccagaatccctcattaggaaaaatcccacctattgtttatttctccatactttcagaaaatacaacaaatgaaataacatcgttcttcactggaaagataatgtatacttttaaaatcttatgattggctgggcatggtggctcacgcctgtaatcccagcactttgggaggctgaggcaggcagatcacttgaggtcaggagttcgagaccagcctggcaaacatggtcaaacccgtctttaataaaactacaaaaattagccgggcgtggtggtgcgcacctgtaatcccagctactatggaggctgaggaaggagaatggcttcaacccaggagacagaggttgcagtgagccaagatcatgccactgcactacagcttgggtgacagcgaaactcggtctcaataaataaaataaaataaaatcttattatacagtgaaaatgaagcacagctcttggcttcatgttattctcccaccatgttttaccctttcttcttatttattttaagcttatcttcatcatagtttatgtatatttagttgccttaaatgatgagggcataaacacctgcatcagaaaaaccagcaatatgggtccaagtttatatttgcatcttaagtctttcatttaacaaacatgtactaagaggaagctgtgtggccagcaccatgctaagtgttcagggcctctttgtctttgagctccttatcaaaagttgattttatgtctcgccagtttatattggaagcatgtcaattagctcagcattgaaatgagtcatactgttgccaaggcactttagcatttggtagagatgattgtgccacctgtgatgtggcagatgcactgttagaggtttacagtgccctatacaagacagagactttctggtaatattgacatcttttgatttttccttaaacactattgcacaagaatatattgcagcaatgctgaaaattctgggctttcacatccggtgaaactctttttgcatttgagaatcttatatatgtagacttaagtttaattattaaagaggagaaaattaaggcatttaattttttcatattctttctatgagcttatttagtaattgtcactattaagagcttcacttaatttatgtgaattaaaatatacagctttttttttcttagtgaagactacgtttattaattgtcaaacctggctttccttgttatatttgggaattaagccatggacagtgctaaaaaagaaaaaaaaaagtagtttttacaaaagtcaaggtagttgagtagtgctataagctgcatctgtccataatgacacttttgtgtgtgtgtgtgtgtgtgtgtgtgaagttccatttttttaaaattacactttaagttctagggtacatgtgcacaacatgcaggtttgttacatatgtatatatgtgccatgttggtgtgctgcacccattaagtcatttacattggatatttctcctaatgctatccctaccccatccccccgccccacaacaggcccggtgtgtggtgttctccaccctgtgtccaagtgttctcattgttcagttcccacctatgagtgagaacatgtggtgtttggttttctgtccttgtgatagtttgctcagaatgatggtttccagcttcatccatatccttacaaaggacatggactcatccttttttatggctgcatagtattccatggtgtatatgtgccacattttcttaatccagtctatcattgatggacacttgggttggttccaagtctttgctattgtgaatagtgctgcaataaacatacgtgtgcgtgtgtctttatagcagcgtgatttataatcctttgggtatatacgcaataatgggatggctgggtcaaatggtatttctagttctagatccttgaggaatcgccacactgtcttccacaatggttgaactagtttacagtcccaccaacagtgtaaaaatgttcctatttctccacgtcctctccagcatctgttgtttcctgactttttaatgatcgccattccaactggtgtgagatggtatctcattgtggttttgatttgcatttctctgatggacagtgatggtgagcattttttcatgtgtctgttggctgcataaatgtcttcttttgagaagtgtctgttcatatcctttgcccacttttatggggttgtttgcataatcacactttttacacagaatttcaaggggaaaatgcccggaggtaccatgtatgtgcttgcccacttggactacagagtatacttatttgtgaacaagccaaaaacacattttaactaaatctgccctcctatttttactttctcaataactcaatccaagagctgttttgaaaagttgacaacttcaatacaaatgttttatgatattcctccaaacttggccaaacaactctttctgtatcgtaaatacttcattgaactcagaattcatctggagatgactccactggcaagtagccgagagctgtggatcctgatttctgtggtgagagtttattaattagagaaaattgctgctctgaaaagcaaccccagaacttccaaggcctaacacagtaagtggctagctagattattagtagagcatggactgatgaccagaaccacaggtggctgtcaagaatgtatagtgaagcaatttgtagactggtttcttaggtttaagtgcgcgtctttgcctcatgggggcactacacacatgcgcacgcgcgcgcgcacacacacacacacacacacacagagtgtattcttgattaggagttacaggtttttttctggatagttaaaattatttttaggaaaccatagaaactatcaaaatgacttactatgaaaatatgcacacaagttgtcaacctgcaaatatatatatgacagctaaggttttcttcatgctactaatcaatcaaattgaattagcaaagagctagaaacaacatagtttgatgaaagatgttgaatctataggaagaaatcttttctacactaatctgacaatcttgacagattagatttaggtgatggatgtaggacacatgctcaaatgatgacagaataactaaaagtgaaaccttagttgaaacctcttcttggcatgaagtggttcaactgtcctgcaagagtgcactcggagtttgtcactgtacaccctgaactttctgaaacattcccaatttaaatgttctactttgtttcccctgtaaaatatctcagaaatgcatttttttcagagtctaaactgcttctcaaatctaagtgaaacagaaagcctttgacagatcatctatctcaagttataatggagaaaatgcatttgcttttatctcaaaccaaaaatatgacaaggatgtatttctgccctcaggcagcttagagcttaacacagaaataaaagtccagctaacaaaagatgagagaggaaagaaggaagagaaggaaatcaaggagattgaggaaaaggatttctgatccacggtactttgatacttggtgtcattgagaagacaaggaaagaaatatgtactttgtcatatttaactcttagcttcacatgtaaaatatcaatttcagaaatttaaaaattgattacttttctacatttataaagtaatattatttattgtagattatcttgaaatttagaaaacacaaagaaggtaagagaatcactcatgattctacttcctagcaataaacaatgttttttgtgtacccatagatgagcttttaaaaaattatactcttcatatgctttttgtagttttgagtctcattgtctcatttttcatttactgtattgtgaattaattttccacatattcatttgcaattttaatatttataacaatagtctaattttttattttaattagcttctgtattttccacatctgtagaatattattttaatgaatgttaatacatgttaattcatagcatgcatcagtcaagatgggttagattatgctgtgttaacgaacagctcccaaaatcttctggtttgtagtgttttctacttattttggtttatatttttttaacgtaaccagcacaatgcccagtaaatcacaggtactctgtaactgtttttttgagacggagtctcactctgtcacccaggctgtagtgcagtggtgtgatctccgctcactgcaagctccgcctcccaggttcacaccattctcctgcctcagcctcccgagtagctgggactacaggcacccaccaccacgcccagctaatttttgctatttttagtagagacggggtttcaccgtgttagccaggatggtctcgatctcctgacctcgtgatctgcccgcctcggcctcccaaagtgctgggattacagatgtgagccaccgtgcctgaccactatttttattatgtttagtagtagtgagcttatcatataattctaagtagacagtaattctgtgattacatgatatacactgggaagatacactgtggatgatgtaactatggtttgaatgcacaactggctgacaggtatattcagagataattttttattgtatcactgttattctaagatatactgtggggtaagagttattttagtagtttcactcagaacttaaatagtatagtaaaaaaataactaaatgtcatcagaaaattacttaaaattctttaagcttttatttcttcactgataagatgaggatcgtaatatctatactgcttaactcacagaactaactaagatgatatatataaaagcatcaaaagcattttacaggctataagataataaagtgtaagttctgttacagagatcaacgcttactgtaagaattctaagtcattacggaaaaagctagttgtgttcactagagtttgcataagagtcctggactgtgtaatgtattttacaaaattttcattaaaatatttatagctcaagaagcaaaatatctactatcagaaaaattcagtgctgttggatagcttatcctccatagataaagaataagtcaggtgttactgacattatttctcatatgtccagaaacctgaagatatgttagcattaaattcataagagattagtgccatttctttgtcatgttcttttgaataatgtccaatattcatctttggggtgtggaggatttggtactgaagaaaatatcaaatgtcagttaaaatgaagactccagagggttggtgatgaagatgtttagtagaatctatttctctagagcctggcactgtttctgacacatatgtggtgttcaatatacatttgttaactaaatagcaagatgtaacttttaaatcatgattttgatttatgactgtaaggagaaatttcctaaaattataaaaattgttggagtattaaaaaatggttgaattcagggcataaatttctgagtgacccttgtttgagttttggtgtgtattttcaaaatgttatgttactttatagttgtgtattctgctttcttaagtgaaagtaagctgttatcctgttttcttttaatttatgtcaatcagtcattcaataagatctcattaatgcattaaaatctgtatgtaagtttcttcagtatataaatttaatgattcttgggattagtctcagttgcttcaatatttaaaagtataattaatattttttaccccactaaattggatcgaaattatttgatagtgtcacacagtcctacaatgcaaaaacagcttaaactacaaatgccatagatagacagacagacagatagatattcctttttattcattttaagattacatcaaaatagtacagaaggtttaactgaatgtatccatgtggtcaaatacgctaaaaggagttttgcaggaggaatcagaatctgtgtaaatgaaggaaatagaatctgtagagtgctgccaagttatggatattaaaaacagcgattgtggaatttaattcctatataaaatatttaaaacccaatttatataataaaatcaaatctattaattcatttgccttttttaaaaaaagcttttttatattgctggatggaattttttgacccagtggtactaaatgtgcattatttaacaaaagccaatactggcagtaaaagcaattctaaataaccttccaagacattctcagagggtagcagtaccagtaagcactggaaaattagttttatttttaattatgaataaattagggtctttaaaatattttgtttagttcatataatgtgatgattcggttttccttctaaagatacttcattgggctgatagaattggaaagaactctaccggtttatctaacccctcctgttaccgaaggaggacacagaggttcagagaagagtaagattcctaaaagcagttgataggcatagtgctatgacctttgaagcagtttgtacacatgggacagttttaacattgcagatgtgtcatgtggtttttctttgggagcaattagagtaatttttaacctgaaaatcattggaaacattttttatttcaagaagctaatctattgtgctaaggttttctttttcatcccccttattagcctgggcattttgataaatgtaactaatattatctagcacttttcaatttcacaaacatatttatattttacattctcacttgagtctcagaaccaccttgtcagataaggcaatactactcttatcccacagatgaggagactgaggctaaaggaaatttaattgttcagatcatgtaggtaagcacagtaggaggcagagccacatttgaacccagacctttctactccagaacctttgtcccatctctgtctagtttacatagttggaagttgctttttaaaagtcagattgttgggcaagggaggggaaaaaataaataaataaataaaagatcattgtgatgacacatcactatttaaaggaattctgtggtcagcccttttgttataggaaaaatgtcttactagctaccacgtgttgaatgcctgctgtgggccaggcagtgtggtaggtgctaaccctcagaatctgcgaagcgttttagaagggaagttgtgctgcttatctagtaagtaactcacgtaggattgtttgcctccaaaaccccaacttccagctataccccaaattcaggtttccctaaaggagaacacactcatatgcttatagcaaaatcattttttaatgtgctcctcatgaattacatacatgggtgttgatatttacacatctagatttccatttattgatgcagtaattgcaaaaatactactattggctcagaagctcatgaaatttaaaaaagaaagccaggaaggtaaatcaatcaatagctgtttatacaagtataattgctggatggcagcgttggttttttttctttgtaattatttatgtacacttttcacaaaatttaaataatctatctgacccactcaaatgaaaatatttaaaaagcatgttcaagcttatggcattacaatcatattcttctgaaactttatcttactttcataatgattagattcagtatatttttcaatgtatatgtgattgtattctggtgtttgtttgttttgttttttttttgagacagagtcttactctgtcacccaggctggagtgcagtgacacaatacagctcactgcagccttgatctcccaggatcaggcgattctcctatttcagcctctcaagtagctaggactacggtgcacagcaccattcccggctaactttttcatattttatttgtagagacagggttctgccatgttgcccaggctggtctcaaactcctgggctcaagaagtctgcccacctttgcctcccaaaatactgggattacaggtgtgagccactgcacccagcctgctggtttgtttttaacaatattttgctttgagttttttttttttttttagaagaagaatctctgatactatcatattaccaaaactgaacaagtcttctcttcaggcccctctttttatatgaatttgttttgaagagtttttttcattgagctggttttttgtttgtcatgggtgtccaggaagatgtcagctgtgtgagcgatgggttggtggagcactcaggtggagatggagaggagacctgggcacctcctgtggctgagtcacagttctccactggtccccatgtctcctttcaggaggagaagtggggcctccagccctcccaagttctgatgtggaaaaaagccgagggatttccacagtggaaatgtatttgagttttgaagttccacctagttcctggaccagcccctcatgtttcacatggcgattctgttgtcctttgtttcagctagaaaataaactttgttcagtcttgccccaaatgagaagttctaggcagccaggtatttggcaagagtataagagtcccaccaaggtttaaagtataaagttgaatttctaagcaagcctaaagagtatgtgcaatacacatcttctgattttatgttgttacatgtcgtgaggggtttggtatcttcaagtaaaggttttaaaggaacctgaactagactcaaacttgaccctctgatgctaatcgaaaatacacaatcatcaaatggcattcttactccattttttaactattacatatcccattttgacaagttattcttaccttttttacataggtcgaactggaaggtacacccttatagagaaatggagagatactgaaagacacttagcacctcatgaaaatcctatcatatccttaaacaaatgggggcagtatgctagtgatgtgcagctcattctacgacgaactgggccgtctctcagtgagcgacccacttcagacagtgtggctcgaattcctgaaagaactttatacaggcagagtctgccccccttagctaaactgaggcctcagattgacaaatcaatcaaaaggagggaaccgaaaaggaaatcactgacatttacaggaggtgccaaaggattaatggacatttttggaaaaggtaaagaaactgagtttaagcaaaaggtgctgaataactgcaaaacaacagcagatgagttgaagaagctaatccgtctgcagacagagaagcttcaatccattgagaaacagctggaatctaatgaaatagaaataagattttgggagcaaaagtataattccaaccttgaagaggaaattgtccgtctagagcaaaagatcaaaagaaacgatgtagaaattgaggaggaagaattctgggaaaatgaattacagattgaacaggaaaatgaaaaacagctgaaggatcaacttcaagaaataagacagaaaataacagaatgtgaaaacaaattaaaggactatttggcacagatccggactatggaaagtggtcttgaagcagaaaaattgcaacgggaagttcaagaggcacaggtcaatgaggaagaggttaaaggaaagatcggtaaggtcaaaggggagattgacattcaaggccagcagagtctgaggttggaaaatggcatcaaagctgtggaaagatctcttggacaagccaccaaacgcttacaggtagggacactttgataaatagaatgtttggcccatgtaaaatagtatcttcttggaatctccttttcatcattgtcaatttttccttatattcaaagaattagaaacccagccttgtttaaaacttttgtcgaactcttgtgacttacgacagcttagatgggagcagtagccttgcggatccttctccatggaagagccttgtcttactgtgacagttgtagcgttagataatgggatggaatggacactaatgatgagatagtgaatctcaccttctcctttcagagatagggaaactagagctgaaagagctgtccatggattggttggccagggattgttgtggctagctgactgcttatctgtcacttctccattgttgccagccaatcccagcttctttcctgacacataaacagcccccgtcccttctcccctctccacagtaccctcctttgctttcctgagagaggcacaaagatttctgtctgattttccccctttctagttcacatacgagaagttctattttgccacttaaaccctaatcactcaacttacatttcttggatacccattcttgaaaagaccctgtgattatgttgcggaagttgcaaagatgtatcaaacagtctgtatcagatgggacgagaaagagacacaattgattacaatatggctacttaaatttaaattaagattaaataataaggcagttaaattattaaataatttaaaattctgtttttagtcacacatggtcacatttcaagtgcccagtagctgctgtacgggccgtgcagacacagaacatttccaccattgaaggaggttctgttggactgtgctggtttagagcttacgattcaaagtgtagtccatgccaggcagctccagggtactacttgtaagaaattcagaatctacattgaaacaggatgcccaagtaatacctgtgtacagtgaggtttgagaagagctgctttagaacatcaacagttagttccacaatcagagaaagctgaggttttaggaagaactgatgtgatctcctttctccgtcattatctgtagtaagagataaaactaccacccaaattttgaaaatcaagaatttctcatgcagtagaagcttgtcagcctctaatttgtcagtattttactattgggattcattttgacatttaaaaaaaggtacaagtggaagttgtgttgcttttgatatcacagaaaacactaacttatcacagtcattactagcaaatccctctacccactgaaaagtgtctgataatcaaatattgatatatccccaagtaccccctacactcaaataagtggagaaaacaaccattcacttctaatctcttcccaacccctaccaaatccttgggacccacccagcctgggtagagccagggtactttttcttatatacagtagaggaaagaaagaaatgaaaagctgtttaaataataggatgcccctccttgcttttacagctttccagctatccaaacttgatctccttctgtaggactctgtagttctcagatctttgtcaaggatttaggaattccatagtgagaatcttgtgggaatcttgctttcctcatgctgtaagataaatctcaataatgtatcccatgaaaattgaaacagcttacaaaaacaagaactctaaatccatggaacaaattacaattaactttgtagttataagttaatatgaagtggttaatatgtaaatttgtgaccagcttagcaagattgctgcaacacagagatgggtaaaaacctgtggggttttttctttttattttccaccaatgagtttacagactgagaaacccatttttgtttttgttttttaatgaaagtttatagacatatttatttcagaagggtgcataatggttttccagaggaaagcatcacatttaagaggacagactaatgaaactgttgtcttcccttggcttatttcttggcctacaccacagagtgaaagtgacctctttagcccattgtgtcaatataaaccagatttgttaaatgtgcttttatgaaagcagatgttgcacatttaacccctgtagcagatggatcctcacaaagatgtcttgcactgtccagtagtgaatcctcaaatttaaaaaaataataatttccatctaggacaaagaacaggaactggagcagttgactaaggagttgcggcaagtcaatctccagcagttcatccagcagacagggacaaaagttaccgttttgccagcggagcccattgaaatagaggcctcacatgcagacattgaaaggggtaagatgttgataaatatggtttattttccctttattctcactgcttaactttttttgtttttgttttttgagatagtatcactgtatcgcccaggctggaatgccaggggtattaccacggcttactgcagcctcgacctcctgggctcaggtgaccctcctacctcagcctcctgtagccggggctacaggtgcatgccaccatacctggctgattttctttttttgtatttcttgtagagatgaggtttcatcatattgcccagactagtctcaaactcctgagctcaagtgatatgcctgcctcagcttcccaaagtgctgggatgacaggcatgaaccagcatgcccgaccatctgcttaactttgaataaactacttgtattcagttaaaatattaccctaacattcatagctaatttttaagtgggacacttaaaaattctttttttaaaaaaatatttcccatttctagaggaaaaccagtaacatttaggttatttatttacttaggtgagcatgtaatcaccaaatgtcatatcattagtttgaaactacttctttattaaaacttttttctgaagtatatatgagttatagtctattaatttgaattttggcttctctgttccttatgccccccttttccttctttttcttctaaaagttattattaatttgtgctgatatttaaaagacaattccaaatctgtgtatgcatatggtgtgaacaaccaaaaaaagaagcagaatattcaccttttgtaaagatcattcactgttcaaatcaacaaaaactagtttatcaaagagacctgagaaggttttagccttctcccccagcccagggcacacaggggattgcaattattgctctatgcagttttcccttttggggtaggaagcagtctgattttttatattgctaagtactccaagttgacgagctcatcaggtggctctctttgtttcctgtttagaggcaccattccagtctgggtccctgaagcgacctggttcatctcggcagctccccagtaatctccgcattctgcagaatcctatctcatctggttttaatcctgaaggcatatatgtatgacattatctgtctttagggaggagacccaacagaggtaccaaggacagtaaacttcctttttgatttgtgccaatgatgaacagaggatctattccacaagacgctgtatgttttttctctcctaaattgcataccacttggagccataccctgtgcactgatgctaaagaacaaagaaactgtgttttcacacatcaacagtgttgatatttttgtccagcagctataatgcaaagccttcgtttttatttgtagcattttgagagctttaggaaagtattatatagtgtgtatacataaataagccgtgacttaagtaagagtgaagagaaatttgtgactggcttagtttaatttatttcatgtaatcaatgtgtgaatgttgatgttttaatatttttattgacttatcctgtgactgacttacgttacatattgtgtgattatgaccgtgtgcatgttgccagactccatccatgcattgctgatttacactacacaagtgtcctagggtgctccaccatcgaagctaactccacaggaagccacttgcatttgttttgtgaaactgtcctagccattgcttaattaggtgaaataattcagggttttttaaatctggaatttagtcgttcctttacaatatttccaaatatacgtgtggccacagagcataacagatatttttcataagctaaattgtatgtataaaacatttgcagtgtttcagacactgttgaacaaaaatgtaattggtaagtatgtatccaaacaggcatggggtttcctgatacattatgtgttttgtttctgccctgtcttatcatttacactcatggatcttcagaattaatctaacatggaagttatagatacctgaaagctgggttggtctacttcaggaacattgctttaagtgatgtattttaaaataacccgcttcatatgtatgatctgttggtgtacacaccatgggtaaggtattgcttgcacataatttgctctgcatattatggaccattgtggtttcttccagtcacttagatggaaaggaggttaaacctaggtactttttagcaaggatataaagtcaaattcagcatatgtttttatttttaggcttgacttttacaagacattaatctccatttgtacatatgttattttatttgtaaaaccaaatatgactcaacacctttttgatgagtagtgacttaactaagatttacaagtaatatttagacagattcagtcagacaccacttagccatttttacattccctctggttagatttggtacagtataattaagactttaatctgaaatttaaagtagttttaattctgaagaagttacatcctctgtattatttacatgcaacaaaataaaagtggattaatatagtaatgccatggtaacaatagagctatgtcttatgcatgaaggcaactttggatgttttaacacatttgactgactttggtttagtgaatgctgacaatgctgctctacttaggtttcctatgaaatttttaagaatggctatgagactgtatagaagcttctagagaactgaaagtcataatgcagagttgccttttctagtgcagctaagtggcggacctcaactgaagatatgagtttctttgggttcttggagttatcaaattgatcttgccattatgttactttgcaaataactgaagtaaatgattcttacctaaataaccacaacctgtacacatttgctcacaatttatagtagttattttctatctacctatatttaaaattaggatgattaaaaaataatttatagattttgtgacagtaatgatttacatatgcccaatatatgccttatttttaaataagtcattctgtataaagtcattttgttgttgttcagagaaatcaagatcttattcacaaagaaaaacattttataaattgatcgcattttctttaagtcaaaatgttaaactggaggcagtattaaactttgcaattaggagtttcagagatgccttggcataccacgaaaaacactgtcaatatccaactcattataaattgttatcagaattaacctaataactttaagtaaggacaagcagcatcctagcaacttgtagtagtcttgggttcccagcagagtatcacagttaacctctctgacaacttcatcagaatttccaagctgccaaataatcttcatagacctaattacagatttaaaaaaatttcctaggcgacgaaagtatagaaatgtgaatatgttgaatacattgagaagctgtactttttaattagttatattacttctggaagcacatatctaaggaatattttctaagactcagagggaaaaaaactcgttttcataggatcatctgaagatactttagtatatttgtgatcatttttatctattgcaaatacaaatgaattagataagtgccacatcctggatacatttcggaggggtagtgggcaatggtatacaaaaataccaaatataaaattttcatctgggggaatgttcaggttctaaatactaaattagatttcaatgttttgtgttttttttaaaaaaatcatattgcaacttgttttattgtgattttctacaagtattaaatacatttaaagatctttttatcttaccaagaaataatttggaatagcattggtatatttgaccttttgagtgtctgtcatcctcagagaatggcccatagtgtgttgcctgtggacatagtgtccatagtccctttcttgtccttctgagatattttggtttgataacattttgttttttgtcttgatgcacagggacttttttataatatgagacttcagttggtattaataggagttacctatttaattctcccagtcatcaatgaggtaatcatcaattcctatagttcaaattagtcataaacaagagctacagcaagactgatagagtaaaaactatataaatacagtaaaaaaaaaatagaatttatggtgtgaaatatgaagtatagcaatatataacaagaacatgtaagcacttgcttccacagcataaatgtaatttacatctgcattaaaggataattttctctgtgaataagagcaaaatggtcttcagagaaacagactgttcatttgaagccatttctgtaaacatcttccaagatagaactgtaatggattgaggaaataacacagaaaagacaaaaacttttgatttcaggcatgcaaagtgcttgggcagatggacagttcccattgtgcattgcctttgataaatttggccttaatttatataacgatgctgtgttcacatccctctcctacctaaagttgtctttattggtttatattgtgttaaaattagcttataattattacttttgtattgtgttcagttttttaagttgcatgtttatactatttgctacagtatttttaagtttggggtgaaggccatcagctgtatcaaaaagacaaaacaatcactatttattcagtattgctgctttacatctccagaataagctttcgatgccaggacagtgactgcctgaaagctgcaggagctcttttcaatgcattttatatatttttagaaaccaaataaatgcagaaaactatttcgtatactaattatattaaaccagcagaaatataaaggcaataaagtatatacatatatatggggggaggggaaagattaaaaaatagatttacagccagacatggtgatagccctaaatgtatttctcaatatgtttttctttattgaccctaggaggatttgagttgctgcagctttaaacagaaaattgccatgttcactaattgtgagcacataaatatgcttttagtactgctttgcttatgtacaaataaatctgtaatatgtattatatgtaattatccttttctttgactttcattttaaatgtatattttctgatcattatgagctgtaaaacaaagaatcaatattggatattctcccaaataataaattttcaggattcattggggcattacagttgtcagtttgtttcttacatcctttatatttttaaatacaattttacttcctttaaaagataccaaagagaatagtggcacatatcactacacataattacatttttcatatatacttaaagaatcatctactgctccaaagatggcttcatcaaagtaaaactgaattaagaaactactatgccttttatttcaaaagtgaaagaagaaatgatatcttaatgaatctctgtattcccagatttccctaaaaccataagtgagaggaagagaactaacatttcagtccctactacgtgccaagtgcaatatggggcaccggtcacactttaaacattcacagccatccaaggaactgctcctaaatcacacaacccctaagtaactgacatagcatttgaacttagatgtttcagacctcaaggcacttttctgtattccatggtagagatgcatgagctttacggtgcccagtttctgcattttaaccactttttaatgtggaagtatataaattgtcatttttataggaatatttttataagaagttaaacctttacttagaaattatacatgagggccgggcgcagtggctcacgcctataatcccagcactttgggaggccaaggtgggcagatgacttgaggtcaggagttcgagaccagcctggccaacgtggcgaaaccccgtctgtacgaaaagtaaaaacaaaatagctgggcgtggtggcgggcacctgtagtcccagctactcaggaggctgaggtgggagaaccacttgaacccgggaggcggaggttggagtgagccgagatcgcaccactgcattccagcctgaacaacaaaagcgagactctctctctctctctatacacacacacacacacacacacacacacatatatatatacacattatgtatacacacacatatatatacacatacacacacacacacacacacacacacacatatatatatatttagccaaagtagtatttattgagccaaagtaaatttcctagtaatttcaactttctttagggccacatagaagaaacaatttcccatctatatatatagagagagagagagagtctcactctaaaaaaaaagtatatatatgagaataatagtacgttataaaagcaaagatgaaatgagaaacttaaagtcattcaaaataccaataagtcctagtttgggggacttttaaaatgttaattatccaccctgtcctctaaaatcatgttttgttaatggcagagcaagaaacaggaactactgttaactcttcacccactaccctctccacatacgtgtgctgtgtctattaggaaagaccagtggagtcctataaaatgggcataaatatgctggatgcgtttatactttctacagacatttagtgagcccctgtttttgtccggacactggagtgagatgcatatatttgttctctaccttcaggaggttttttttgaggtggagtctcccattgtcgcccaggctggacggcaatggcctgatctcggctcactgcaacctccccttcctgggttcaagcaattctcctgcctcagcctcctgagtagctgggattacaggcgtccgccaccatgcccagccaaattttttttttttttagtagagacgggctttcactatgttgaccaggctggtcttgaactcctgacctcgtgttccacccgcctcgtcctcccaaaatgctgggattacagcagtgagccactgcacctggccggtttacagtcttgatgatagagatgacaacttcagtacaacatgttaagaaccactagaggggcaaggatagggtgtcacggagacaaacacattaggagatacttaccccaacccagtgtgttggaagatcctggaaggtgatataaacaagaagggctgtctggtggagctgtagccagacagtgaagagcccgggaggtccaagagagatgggaagtaggcatctgatcatgaggggccttggttgccatggtaaggagtttggactttatcctgacaggcacaagcaaattttaagcgtggaaattaaatgattagcatgttaggaagataattctgactggatatgtgaagaactgactaaagaagggtcaagactagaggccagaaagactacttaagaggcctgtaggagtccaggccagaggtgatggtaactcaaactaagaaagcagtttgtgcacgtaacaaatttttattgggcaccttctctgagccaggaaatgaaccaaacaagttatagatattctaagtagacaataagaatcaaagatactccaggtgtttaccacttacccacagccttaaagggtggtggaaatgatggctgtgggtctctcagtgagtagtcacagataatctgttctttgtgctgttgggcaaggggttggcacaggagcaaggaaaaagaataaaaacatggagaatagaatatgtattcaagaggtgggccttcaaatgggcttcctttttatagagtgtttttgcagtgttccctgtgagaatgacatggatttggaagaagtgctcttctctgcaccaaatttagccatccacaagtctcatcatccagtatgttggaatcctgttttcccagcgttatacttgactgcatgttctatatccaccactctcttttatctgccatgtgtttgtgtccaaggtgatagagggtctgacatggtccagaatgaaagaagtgaagaaggtggacagtacaaattccgtgtacacaaagtcaatatttacaagtctcctgcaatgctggaagtgtgaagatcaaataaacaaattgaaatacttagtaacaaaatatttttaggcataaagcaaatcataggcactttaaacaagaaacaatcagcaacagtcaccacacaaagggaggctggggagacagggaggagtgcggcatgtacaccaggaacaactcactcaggcaagggaggggctcaccagagaagccactgtgacagtcattgggcacagccacaaactgctcctacatcaccccaccaacgccagcctacatctgaatcctttgagggccacaccatcccagcccatctcgacaagctaaaaaggtctttttattgaggcaaagtagattaccttgtaatttcaacattctttaaggccacatagaagaaacaatttcccatcaatatgacagcacttcaggtatttggggggcatctatgatgccccctagtcttctctttcccaggctacatattcccgattcttgcaaatagtgcagtcttcagtctcctctctcctgaacacactctacaccaatcgtgactgtgactgccaggactgatcacaaaaatctttttttttttttaattatactttactttaagttctagggtacatgtgcacaacgtgcaggtttgttacataggtatacatgtgccctgttagtttgctgcacccattaactcgtcatttacattgggcatttctcctaatgctatccctcccccagctccccaccctatcacaggccccagtgtgtgatgttccccaccctgtgtccaagtattctcattgttcagttcccacctatgagtgagaacatgtggtgtttggttttctgtccttgtgatagtttgctcagaatgatggtttccagcttcatccatgtccctgcaaaggacatcaactcatcctttttttatggctgcatagtattccatggtgtatatgtgccacattttcttaattgtctatcattgatggacatttgggttggttccaagtctttgctattgtgaatagtgccacaataaacatacaagtgcatgtgtctttatagtagcatgatttataatcctttgggtatatacccagtaatgggattgctgggtcagatggtatttctagttctagatccttaaggaatcgccacactgtcttccacaatggtcgaactagtttacactcccaccaacagtgtaaaagtgttcctatttctccacatcctctccagcatctgttgtttcctgactttttaatgattgccattctaactggtgtgagatggtatctcattgtggttttgatttgcatttctctgatgaccagtgatgatgaacattttttcatgtgtctgttggctgcataaatgtcttcttttgagaagtgtctgctcatatcctttgcccactttttgatggggttgcttttttcttgtaaatttgtttgagttctttgtagattctggatattagccctttgtcagatgggtagattgcaaaaattttctcccattctgaaggttgcctgttcactctgatagtagtttctttcgctgtgcagaagctctttagtttaattagatctcatttgtctattttggcttttgttgccattgcttttggtattttagtcatgaactccttgcccatgcctaggtcctcaatagtattgcctgggttttctactagggtttttatggtttttaggtctaacacttaagtccttaatccatcttgaattaatttttgtgtaaggtgtaaggaagggatccagtttcagctttctacatatggctagccagttttcccagcaccatttattaaatagggaatcctttccccatttcttttttttgtcaggtttgtcaaagatcagatggttgtagatgtgtggtgttatttctgaggcctctgttctgttccattggtctatatctctgatttggtaccagtaccatgctattttggttactgtagacttgtagtatagtttgaaaactctctttaaattaggaacctggctcattgttaggagtcaggctaaagctaaactggtttggttggctggtttttttggaacttcatcttactgaatcattgaactgacagttcattaaaatccagtttttcacatttttctactgggaaatcttccataacttgtatgtatgtaattgagtttcagagtgcatatgcaggatcatactttgttaaaatacttatctctaaaacctctgaaataataaagagggaagatgtgggctttaatgtcaggtcaaaatcgaggttaattttgttgaaggcagagttctacagaagcataagcaggtgataactgagtaaatccgggaagactctgatgaggaggtgaattaggcttttgaagagtaaacaagttttcactgagtcatatttattgaatgcctactgtgtagtagacactggagatatagcagtgaatcacaaaaaccaaatccctgcccatgtggaattcataccttaaagaggaagacagatgttgaacaaagaagcaaaaaattagtatcttcaattgtgattagaattaatgagaaaaataaaagcagcaaagagggataggaagtgcttgtgattttatacagtggcttgagaagtcctctcttaaaagatggccttggagtaaaggtgaaggaagtgtgggcaggccatgcagaaatgaaaaggagtaatctgggccacataacccacatcaggcttcagtgagagaggtctgagaagcctgggaggcctctggagtccagctttctgtttgtaagcaacagatttggaatatataggccttttcctggctgtgagccagtaaccccttccaagtactcacttgatcattctcagatctaatataatgcaggaagaagatattttaaatataaacacatgtttaaaatctgaattgaattacccttaattcttcccaaattaaaattaaattcacaggtaagatgtccttctatgaatagacacaaacttggtttagtctatttcccaaaatagtagtaaggaataaccattggatttaatggtgccttcttttgctacatatcctcctccaaatataatacagctttataacctaaagatatgtatttttaaaattcaggacattaaacaaaaataattcattgtcaagtactcttgtaaacttaaatgaatatttctagaaggttctcaaaaaaaaaggcgctaaccgaaaagacaaagacccaaactaaagctagtaattgagatcatgattatgtatacaaaaacaaattcaccaaccttaactcttttttgttgttgtgtgtttcttctgttttatctagggatcatcattctttctgataagcaggagtgtaaagattagatatcacaccaaaagctcaggcaagaaaagcaaaaatgaacaagtgggactacattaaacccaaaactcctgcacaacaaaggaaacgatcaccaaaatgaaaaggtggactgtagattgggagaaaatatttgcaaaccgttatctggtaagggtttaatatccaaactatataaggaactcacagaacttaaagaaaacaaataatccaattaaaaatggtcaaaggggctgggcatggtggctcacgcctgtaatctcagcactttgggaggccgaggtgggagaatcacaaggtcaggagactgagaccatcctggctaacaccatgatgggctaacacccatctctactaaaaatatgaaacattagccaggtgtggtggcacgcgcctgtaatcccagctactcgggaggctgaggcagaaggattgtttgaacccgggaggtggaggttgcagtgagccgagatcgcattactgcactccagcctgggtaacagagtgagactccatctcaaaaaaaaaaaaaatagatatttttccaaagaagacataaaaacagccaacaggtatatgaaaaagtgctcaacatcactgatcagcagggaaatgcaaatcaaagccacaatgagataccacctcacacctgttaggttacatctgctattgtcaaaaagataagagatagcaagtgtcagcaagggtctggagaaaagggaatttttgtatactgttggtgggaatgtaaatcagtacagctattgtggaaaacagtgtagaggtttctcaaaaaattaaaactatcatacaacccagca

SEQ ID NO: 176 - DNA, 18997 bp, Homo sapiens
atgggaaacaagcagccccagaaggtcacggtgcctactgggacagccctccaaggagtggtattgatcgtctccacgctgcaccagccaggtggctggatatgtggcaaggatccctgctgcagcttgaggtagcgtcgtcctcctgaatctagtgccagctgagctctgcaccaaccgatgaggggaattagctggacaatttcagacaagactggccccgttcgcttttgcaagggggtacatgctccctcttacggtcacagtactgcctgcaagggtagaactggggagcagctctgacaccccacccctaccctagcctccacatctgccggaatgactgtctgagccctgtggggagaggtggaaggagcctaggcttcagtcaggtggacccagggttgaatcccagctctgccctttctagctgagtcacctcagaccagtcagcctccaagcctgtttcctccaccgtgaaatggactcagaagcagccccctcttggcggtcctgtgaggcttgagaccatgcatatagtgcctgacagtaacccacttagtaatatgattttttaagtgcaccatttcacatgccctgctaaccccaaccttaatccttatgctgggtgggcggtccttctgtggctgacggatggccctgtgaccctgcctttccccttggcaggctcccctggtgccctcgtgtctgttgcagtcagcaagggttggggagtggggttgggcagaggctttctggagaatggccaaaatgaaaattgtgtgcgagtggagctgatcatattaagatccagctgcacttaagtccccctctggaagttctttaggccaaactgaagagagctcccagatgccaaagtggccttgcgttgatgctctgctcactctcggcggccccaccacatgctccccaggtaattggtttcctaatgcactatccctggacagattccaggattccagtgccttgtccccttggggtcagttcttgacgtttcctagcctggcaagggtcgccgaccaggctcagatgcacccccacaggactgtattgttttctcgttcttgcaggccactttcaaactctgtacagaacgccttggcctgcaagagtaaacaagattaccaggctggaattctgttcaagaccagggcttttatatccagagattgtgggtcagatgcggtgagggatacgtgaaaggaagacacagtgccttccattacagatagaagtaaacccatgtggcttctattttccttggcaaaattagttttttctccttactacaaaagaggtttgtgttctttgcaagaaattaaaaagaaagataaaaagagaaagcgtttgtaacttcacaagctagacatggcaactctttacattggtgtgtgtgtgtttgtgtaagacagggtctcactcttttgcccaggttggagggcagtggtgcaatcatggctcactgcagccttgacctccccgggctcaggtgatcctccaacctcagcctcctgagtagctgggactacaggtgcaccccaccacacctggctaatttcagaatttgttgtagacggtcttgccatgtagcccagcctggtctggaactcctgggctcaagcgatccgccccccatcggcctcccagagtgctgggactacaggcgtgagccactgagcccggccagcttttcacaatttgcagtatatatattttttctacacatttatgtgctttttaaaagaaaaaattaccatcttactgaactaatagttttggggcctttttctacttaggtacattggtgcctgccattaattcttgttctatgacatcatcttgagtggctgcatagtgttatatacagttgtattgttatttaaccagttcctttgtgttggatttagatggtggttggtgttgatgctgtttttgatattagtaacccttttgttggttttggaaatcacgagaatggagggagggaggtagggagcccattcgggctttgacttcattcagacttcaattcaaataataaaaagagcaggtaacacttttgaaaagctgcaatatgtactaggcactgcattcattgctttacatataatcagtgcctgatttatgaatcctcacagcagcccatagactaggcactatttttatctccattttacagttaaacggaggcacagctcttccactggtgtggctgggtgcagtcctgtagctaaacctttgagtacatctctgattgtttcttagaataaattcctaaaagtggggtcgctggcccagatccggaaggctatgcatattttaaggctttgaatacataatggaaatggctttccagaaagagtacaccaatttatccacctgccagtggtgtttgagcagatctgagaaactcctgccctgcttgagcactgactgtgtgctgggccctatgcttagtcttttataccatttccctcctcagagaagaagctgtcctgtgcctggcacagagtaagcaagaactcaggacatctcagccagtatgggtggtggtattatactgtgtgtaatttgttgagaaaacaagacacacacttggaaaacatcaataataaggtgaaagtggaacaaggggtcctgatgatgagtcttagagctggcagaatatgaggtggtggccagggaagtctgcctgttggaggaggcacttggagaatgggcaggagcaccctgttaagtgacagctgaaaggctgatgagcagggagggaccccttggtagcttatgttgagctggaggggagacggtgggggaggaagatgggcccacatcaggcgtaggagctggcttgggcagaggtgagaagacctgggagagagactgcaggagtccaagtttgaggctgcacatgtggcctgggggacacctctaggaatggtgaaaagaaaagatgtcggattttctagtgctggtaacaccccttcttcccatgagtgctgaaacaacagaaaaacagacacaggactcagctacgaggtcagcatatcaaggttattactgataaggccgggagaccttggcttacctccatgaccacagtcagacttcttgatatgccttcaccctatcaaggcctcagggtaccccatccgaggaaacagtctgtgctgcaggcccggtctctgccagccgccaggaggatcgctgcctcccttggtgagcctgcgagtggggagcggaggaggtgggcctccaggtgtgcttctcaaaggtggatgctggcccttccccatggaggacgcaggagctgggcagcgggcactctctgtagacaagcagctcagagtggccaggaaagggccagattccctatgcccccagctcagctccttctcccaagctgcttataagtcattcctccgctctcgggaaagagagttagggaggctgggaaaaggatggaagctgcctttccgatattcttccctcttgggaatggagcgttcctctcctcattgcaacacaaggtaggagaggcagccactgcccccatgctggctgttgctcatcccagcccaatccaagatgcttcagaggaaagactgccagcaaccagccaggcaggatggtgctgtggtggcaattttagtccagtagacctggttctagttccagctcctccactgactgctacatggcctttggcaaattcttagcctgagtttccccatcttctataaaacagagttgttcaattgagagagacaaaatgtatccgtctcagtaccggcagctattcttatgaaatagtgtgtgaatgcgaaggaaagagcttgtgtggccttgatttttgttgttgttttttgcttttgttttgagacagggtcttcctttgttacccaggctggagtcattggcacagtcatggctcactgcagccttaatctcctaagctcaaatgatcctcctacctcagcctcctaagtagctgggactataggcacatgccatcatgcgcagctaatttttaacatttatttatttatttattttactttattttgagatggagtttcactcttttgcccagactggagtgaagtggcacgatcttggcccactgtaaactctgcccctgggttcaagcaattctcctccctcagcgtcttgagtagctgggattacaggcacctgccaccacgcccggctcatttttgtatttttagtagagatggggtttcgccatgttggccaggctggtctagaactcctgacctcaggtgatccacccaccttggcttcccaaaatgctaggattacaggcatgagccaccatgcccgaccgctaatttttaaattttttgtagagatgaggtcttgctacatggctcaggctggtttcaaactcctggcctcaagtgatcctccctcctcaggcctcccagagtgctgggattacaggtgtgaaccaccgtacctggcctcttgtgtgggctttgggcaggtcttacagccatggagcaacgtctgtgtagacgtgttgagagcaaggacttggggaaagggaggacccagcctgaccaagagagactgaggaggagggtggaagggagggcagagagggacctcaatctgagccattctgactgttggtgggaagaggaaacgcagagaaagcaacagagaaggagcagccctgagaggaaggcactcccgagagtgtctgtcccagcagtcagaggcagggccggattcccacctggcccccagcccctgtgaagccctggattcttcccctctagcctggggtaaggcctggcaaggtggttagtgtccagaaagacagtaagaaacctggcctgtgtcctggcatagaacactctggatctttgtcctgcctctggctcctgggaaaagcctcttcctgcccttggtctcagttttcccatctgtaaaatgtaggggttgagccatgatatggtttgaatatttgtcccctccagatctcatgttgaaatgtgactcccagtgttggaccgggcctggtgggaggtgtttggatcatgggggtggatccctcatgaatggcttggtgccctccccatggtaatgagtgagttcttgctctgttatttcacgctagaactggttaattaaaacagccaggtatcgctcttgctccctctgtcactgtgtgatatatgcctgatcctgcttcactttctaccatgaataaaagcttcctgaggcttcaccagagccaagcagatgctagtgctgtgcttgtacagcctgcggaattgtatacagaacctcttttctgtacacattactcagtctcaggtagtcctttatagctatgcaaaatggactaatacaaaccaacttaaaaattgtttttagctcctttgaccacaacccatggtaaaaaagaaaaaaagttttcacacacacacacacatgcacacacgcacacacactaaaactaaagcttcatgaaacaatactgtatgtactgtatggcatatgtttactctgatgttttgtgttccattgtatattgtttaaaaatgctgaccatggcccccaaactgattgtacagcccgttgatgagccacactccgtggtctgaaaacactgacccagctcatctagaaggttccttcctgctctggcaggctgtagttctgttccatttcctgtggccttacgaccccatcagccaagtctttgtggttttcttctttgtactcttctaacagtgatttccaatctcagactctgcactgaaggcatggtcatgagcccagctgctggaggtgtaccccccacgcccctgtctgagcagcgtgaggccttcgaagccgcctgctggggcgtcatgagtggggaggggccttcatgccttctgccatcatcacagagtaggtttgggtgtcatccacactcccctccatgccccaccgcaagactctactgcatcagtctattccctggaaaaatggttgggatttagagtctggctgccagttagaattctagacccttcccaggcccagctagctccctcttcaccctctccctctgcccactgaacccctccctgggcaggtccaggggtcaccactgtgggaggtgctgatgggtgaaaagagctttggcagcagattgacctgggtttgcatcccagtgccacttctgcctggctgtgtggccttgggaaagttccctgacatctctgagcctctttccttgaacaaagcttggagatagtcgtactgctctgggaagatacatttaagggtgagatgataggcacaaagtgctttttgttggtgcctggcaagagttaggtgctcaggaaaaattcatgcctttaaatctcgtcccctgcgcgtccctttaagggaatggctggagaaatgacagctgttgccatcttgaataaagtaggggaagatgccttccacaggggggcaacatcaggaagaggctgtctcaaacagggtgcaccaggagtaatcccatccagccccaaacctgtcctaaaagtgcagagcccagtgcagcagcaccctggtgttcacagggcagcctgaggctgtgtctgaggagaagcacaggcaggccttagggagaacgggctctgggaccccaaaagtgggcccataaggatgacggtgtgtcctatcctggggccaggcttagaaccttaaatgacagggcatcattgcgaccctaattcttggaatccattaaaaaattcaccctcctgtgtggcctcattttatctcagtatgttttcaaaaatgtctggtgagatcctcatgactgccacccagggagaaggatggggcacaaatgagacttccacaatcccagggtcatgagaagacttttttttctttctttttctttttttgagacagggtctcattctgtcacccaggctggagtgcagtggcacagtctcagctcactgcaccctccgcctcccgggttcaagcaatcctcctaccctagccccccgagcagctgggaccacagatgcgcaccaacatgccgggctaactttttgtatttttagtagagacagggttttgccatgttgcccaggcaggtctcgaactcctgatctgaaacgatctgcctgccttggcctttcaaagtgctggggattacaggtgtgagtcacggcacccagctgagaagaactttctagcaaacaccagaaccaaagtatcggagcaggcagtcctgagatgctgtttgcgtgccctcatgctgttaccccttaccaaggcttcgtgaaagtcgtctttgcaggtgtcctcagcacccacagcacttttgttttggtgcccaaccacagtagtaaattgttgaaaggtggatttgaaccaagctggagatagacaagggatgtaaacacctccatcaccaggccatgccagggaagctgcttcccagaactcggaagcggttccttccagggctcctgactcaatagccaccccctttgtcacctcagctcctgatagctgcagagcctagggctctgagagccaaagtgacttgccctgggccacacagctctaatagcagaggctggaggcgctttggagggctgcgctgtgtagctggggcttggtactacctgggaaaacctctgaccctcttgcttctgcgtttctggctccagctgccctcttctctgtttttccagtaggcagaagactctgcttccaagggagagacttatactttaaccttggagcataaggtaagtccctcaggcttgctttatggaatcatggtactggctcatggtttggtaggagcagcgaaacttctcagaatgcgaggctacaagcccagtctctatgcttactagctggtggatgtccctggacctcagtgtccctgtccacatatgagggagtaatgtcagatggacctagtccagagaaccagccctcccagggggcagccaggctcaaggtaaagtccaggatggggtcccatcctgactccaccctgccttgccgctggctgtgtgaccttggtcttgttccctcccctctctggtcttctctgtcttcatctcaaaagacagcaaagatattcctgttttgctgaagtcagaggggtgaaactactttgcaaagcttaagggccaaaaattgtgagggattttcttctcagccatgtaaagattctcagaccagtggtcccagaagaggaacactcaggcctgcaagaaagcatgtgggaagggctgagccacagaccctgggtgggtgaagctgtgccggaaagcagaaccttggcagggaaatgagctctcgttactcacatcagcaccccaggtccacaggctgggcttgattcttgggaggtcttcttgggaggtctccctgggctgtggctccctcagagtccccaagagtctccctgcccctgactccaccctggtgttccctgggactcatcctgggagtcaggggtgccagggtgcctcctccggtgggaccagccctgccatggcagccgctgcagctggtatcccattgcagtgttacagtgaggctcagattacacagtgagctcatcccagcatgaatggggccaccggggcggggcactggaaactgatggaccgatgagggggctgtcactgggggtctccctggaccctctccctccctccctctctccctctctgtgtgtcttggactctcttcttccctgtctctctctccctctcctctctctccctctcgtgcacactgacaacccttcttggagattgcctgggattgtcatggcaaccctccagcaaaattatcgaaacacttttatgctcccagtcgtaccagacgaagtgctaattctgagtaaggctgaagcagttggttaaatgctgaagtcacaggctttgtgtggagggccccctgggggtggagtgcgcaccagtgggaggtgagggccgggacagggggcaggaccacccgaaaaagactcagtctctcgcctgctagagatgttgtgtgtgttgctttcctgtccccaccccttatgccacattcacatttgcattccacacacacacgcgcacacacatgcgcacacacacacgtacaagcggtggctgggccaaacacacccaaagtgtagatggacccaaacagtaccacctggaataatcatcacctcattcagtgcttggaactctgagacccactctagggagagttctgggtgaggcgggggatggccagttgcccagtgcatctagctggcaccgggtctgagctagggcaacagcagctgtgggaaggggcctgaccttcctgcctaccccccagggaaaagcagaggaggacctgtgaacgttctgccccaacctggttcttcccaccttgatgtgcatcctgggacacactgcatccctgctcccctgtgactcacgcccaggttaccataggctgccttggaaacaaagccctgctaatggctgaagaactggtggttgcttttttaaaatcccagctctgcccagaagccaaagtgtgggtagggacgatgggggaggtggtgcacaaggccctcccctctctgcttccatctccccaccccatctgcttccccaggacacccctccatggaagccagccttcccctgcagccccggcacaggctgctctggctgaaggggaggcatctactcctgtgaatgggtcccctcatcctccagaggattctaggatgttagagcaagagggacccccggcgaatcagagtctggcctccttgcttcccggatgggggaaccgtggctcagagattggaagcaatggttcaaggccacagagtgtgtacacgcacacacacgcatacacacatgtacaagcggtggctgggccaaacacacccaaagtgtagatcgacccaaacaaccaacctgcaaccaggcttctggattccaggccagtgctgttctcattgcaccagagagaccataggatggggtggtgcaagcagtgagcaccaatttcagaggcaggcaggcctggccttgaatgctggcttcagtgctcagcacttagtgtagccctgatcagccccccagccccctgagtcctcagctgtaaagtggggtgatgcttgggtccctctggaaggacacagtgaggacaactttaatgaggtgggatgtgcacgtgcaaagcacagttggcaaaaggccagacacagagtgagtgttcgacagatgacttttatttttattttttattttttttagagatgtggtctcactatgttactatgttgctcaggctggccggaaactcccgggctcaagtgatcctctagcctcagactcctgagtaactgggactgcagacatgcgccaccatgcccagcaacaaatgacatttctgtgtccttcctctgtagccccagagctacagacctgctgagaagagggactgtcctacatcccttttaagggccgacccctgtcccggggtggctgggtgaggccatgtagcctgtcctggaaaagcccacactgacccctcccacagctctgagcccctgcaaacccagcaagtcccagagggcaagaggaagcaggacccccgatgctgggcaggtccccagtacctaatccccccaggcctgcccaccctttgcatcttggctgtcaggcctttggaggaaagaaaaatgttgaaagaggtgttgatatccgccaaggtccccgagggccacgtttgggcatcagcagtaacaacaccccaacctggttcacttctgctgtgtggaactccacccttggagatatgattagagtgcagcgttgctcgggctggcttcctcttttaaattgtgagtcaggcaggagggtataagccaccaaaacccccaaatgccctctgaagcaggaatttcttggaacctttccctgatatcttctcaaccaagttgggggctgggtaggtttgaggaggagatcataaaagcaaaaggaacttttattttatgcttacaacatgccgggtactgtgctaggcgctttcctacacactggcacccaggggcattgcttctacacactggcacccaggggcattgcttctacacactggcacccaggggcattgcttctacacactggcacccaggggcattgcttctacacactggcacccaggggcattgcttctgctttccaggtgcggaaggcccaccaaggtcacagaatgagtccatggcggcacttaggttagaatctaggtctgtgttctccttacctgatggtggcctttggctggctccttgggcagggaagggcagagaaggcataaaaaggcaacggcggggaggagtggtcctggccctagggacatcctgaggtgggggagtcatggctggggagggtgggtggtaagccccggggatctaggcagtatgggagctcggtcctccatgggaggttcaatttccccacccccccctcctgccctcttctaagaggccctcagtgagcagggcccaagacccaggaggggatgatcttattgctactttgggacctctgctatgaagcacgcaccctctttcttattttcactgccctgggccaggatggggaacctcccatccaggggagtggagggagttgacttagggtaccctagtccccagcctcagaatttggggtccagaggagctgtgtgtgttggagacagtgtagccccttggctggcctgtcaggagccgtggaagcagggcacatgtggtagcagtccatgccacagggacctctgcatgccagctctgtgctgggtgctggaaaggcagtggccaacaatgaccacctagtggggaaggcggacagtacagtgtcaacagacaagaagaccctttagataatgacaaacatgccatgaaagaaagggggacagagagactgaggggcagccgtcagtagggtggctaggcgaggcttcttcaaggaggtaacatctgagctgagaactctgcagggcagacagtcaagtggcttgtccaagctcacacagtaagttctggggaagccagactagcacacgtctctagactcccttcgagtggtctccctgctcctagaaacatccttctcttggattctgacatgtcttcctgttttcctcctaccctgttgaacactgcttctctgagtccttggctgactcatcctctttccagtgctggactgttccagccctcctctggaatgtgggcctccaccccgccccctccaaaactgccacctccacccctcacctctcccctagcttcagtggcctgcttgacatctccacctggatgtcgaagggtctcttagaacaatgctaagtccatataatagagaccccaagttagagtagtttaaaaagattcagttgattgttcactcctgtaatcgttacaggggaagtgcttcaggttggtggatagctcagctccacgtggtcatttagggactcggactaatgatggtgctgctatctttaacgtgagagttccagaatctctctggttattgctcttctggccagcgtgaggggaaaaacacagaagtctagggcaggaatttcttcttaatcgagtgaggcagaagttgagcatacttctcacattccacagatgagagtttagacacatggcctcctagctgcaaggagagttgggtcatgccacagctgggtggatagctagccatctctgtcacagtctgtcctcgagaacagtgaggacttgcctgccctggcagcggaggaggttctctgggggggtgaccccttattctgtgtctccctgaccttggctttgcccttcaacattgcttgcctgtcattctccacaaccaccgacagggtgttgagagtctaccctccttagatgctgactcgggcttgagcaatcatgggcttttgcagtccagccttgcaattttgttggtgataacaattccttcagaaacatagtaggcttcatctttagtcagttccttgagccgtgaccacatccaaagttcctttcttgacagagttatgaagtctatcttccatacccttctgtttcccattcatttaaaatgaaagtggctgcgtgcagtgactcacgcctgtaatcccagcactttgggaggctgaggcaggtggatcacctgaggtcaggagtttgagaccagcctggccaacagggtgaaaccctgtctctacaaaaatacaaaaattagcagggtgtggtggtgcacgcctgtaatcccagctactcgggaggctgaggtggaagaattgcttaaacccgggaggcagaggtgcagtgaaccgagattgcaccactacacaccagcctggaaaacagagcaagactccatctcaaagtaaataaataaataataaataaaatgaaggctatcctaaggacatcctaaataacagacttagatgtaatacccttaatataatactttgccacaggggcgatttctttgtttggtttaaagtttggcctaagagacaggctttgagagaggctctgagccacgatagtctgacttcctgctccttggacaaaaccagttggctttttcaatgctgaggacaccagttttctgaattctctgtatttctgtgtatctcttcttgcaaactggccaatctctttcttgtaatattttgctaaaagcaacatcaagcagccaacacatgcaaatggcttcagctctttccaaccatttttctagaattataggctcaataggcatgtgggctgtcttccaaatgatcacaggtgacatttgcaataaatattttgtcccagcataacaaggttcaccagcttctcatcctctaatatgtttccatcttgctcaccacctattggctaagccaatgccacatatttgaggggttttatacatggcagtttcccactcctggtataaatttctataaggagctacaaagtacagtggttttaaggttatagaaattgctttttctctcacataatacagttctgatgtgagcatttcaggcctcattcaggtggatggtgggttttaataagcagccagcagactccacaacggccccccctccccacccttctcttctccaacacatttgcctgtgtgtcaatggcaccaccatcacacacttgctcaagaaaatacacagaagtcaacttattttttattttttgagacagggtttcactctgtcacccaggctggaaggcagtgtcgaaatcttggttcactgccacctctgcctcccaggttcaaacgattctcatgcttcagcctgggtagctgggattacaggcacctgccaccacacctggctaatttttgtatttttagcagagactgggtttcaccatgttgcccaggctagtcttgaactcctgacctcaagtgatccatccgccttggcctcccaaagttctgggattacaggcatgagccaccgtgcctggacagaggtcaaccttgatccctccctgacccacagctcccatctaatctatcagcaagttctctcagttctgtcttcagggaaatcccaaatgtgaccatttcctacatctccattgcctctaccctaatccaagccttcagtgttgtgaggtcacataatattcttccaagagagcttcttgcttctttcccagctcctctccacacaacagccagagtgagtattattattattgttattattattattactgtatagagactgggtctcactatgttacccaggctggtctccaactcctgagcttaagtgatcctctcaccttggcttcccaaagtgttgggattacgggtgtgagccaccgtgcctggcctccagaatgagttttgaaaaacataaattggagcatgcattaagatgccttactgttgcccttagaatgaaattatatctttttttttttttttgagacggagtcttgctccattgcccaggctggtgtgcagtggcgcaatctcggctcactgcaagctccacctcccgggttcacaccattctcctgcctcagcctctcgagtagctgggactacaggcacccgctgccacgcctagctaactttttttttttaatttttagtagagacggggtttcaccgtgttagccaggatggtctcgatctcctgaccttgtgatccgtccgcctaagcctcccaaagtgctgggattacaggcgtgagccaccgcacccggctgaaattctaactttgtaacctgccactaaggcctcaagtgattgtccccccttcccatccccctctctcactctgctttagccaacaagcctccttgctgtttgttcttcgaatacaccaagtgtattcttgccttagcgtctttgcactaagactccctctgcccagacactctcttcccaccttgtcacatgactggttccatctttgtccattgcagggcaaaccgctgcagtgtagtggctcaggagccacgctgctggggtttgaatctcagctcttgctacttcctgctgtgggaccttggggcaagttttcttagcttctctgtgccttgacttttctacctgtaaatggcgataagaaatgtatggtatttgttacccagggtggttgggaggattaaataatatagtgaacacattgagttcacgcatcaaaagtgtgcagagcatggccatactaagcacttagcatgttattattgcccttctggtggcagcttaaatatccaggctctgagcagcctttcctggtcccgtgctctaagcatctcaccacctgcatccccagctcatcgccctactttatttcaccacaaaacatgttcttcttcgtgtgtgtatcatctgtctctccccacaacaccccactcccattagaatgtaactttcatgagggccaggactgtacctttcttgttggcttccatgcctttcctgagcaggaaagtaacttctcagtaaatctgtgttgagtggatacggaaaggacggaggccaaatcccactgaccccctcctttttgggtggccctgtgagccctgctgggtgcctgtcagtgccccacatctcaagcccacttggccatggccaggctcacagtttcctcttgggagtcccaggacatagggcagggactgccctgtggacctgctcttagagaccttgggaacactggtgagatttagctcagggtactcaccctcagcagggggctgtcagagcatggactctggagtcagcccatctgtttccatcagatactagtggaccagttacttatcccctctgtgcctggttttcccatatgtaaaaatgagagaataccaattacctcatagggctgctgctgtgaagattaaacaggataatatacgtaaaacagagctcatggttggcttggagtaaagctctccagatggtagctattattgttgttgttgttgttagtgccatatccaagtgtcactcttcagagcatgaatgggggtgcccgagggacttgggtgggggagtgaggagacaaacataaagaagacatctagggaagggaagaaccggaatggaataatcgagatgtgtttgcattcgtgcgtgtgtgtgtgtgtgtgtgtgtgtgtgtgtgtgtgtgtgtgcgcgcgcgcgcctgcggaggggggtggcaaggatccagaaggggagcccaccccttcttccgagctcagctctggggagccgggcgctcaggctcgccaggctgcaaagagagctgagagctgcctcgcgccccgcgcagaaccggcggtggaataaccagcgcctcaagtgtgtgcatctgggaccagggggcgggggagggggacctgcggccccgcggccaacccggttggtgcagacttggggatcccagaagggacagtgcccgcccagtcgcggcgattgagggtccctgtccgggcgcagctcgggccagccgcgtgctccggggccgcggcttctcccggaacccccgcgggcggggcctgccttccggagccggttggcggggggcgggcggcgccggggaaggggccgttactttcccagagcggcggggcgacgtcaggcggaagggcgcggggcgcgcacgctttaaatggcattcgctgtcatccgagctcagagccgtgtgggcagccgcgggctatataagccgcgagcctggccgccgcggggcagacggcgacagcagcggcggcgagcgcctcggagcgcggcggaacagcgccccccgagccccgtgccccccgacgggtccgcccgcccgcccgccctcccgaggagcgccggcccgggcccgcgagggccgccgccaccccgcagcagatttggatcccccgcccggcgagcccccggctgctgcctcccggggggccccggcgcagcggccgccctcggagagccccggcgccccgccgcccggccccgcagacgccggaggcgccatggccgccaagcccggcgagctgatgggcatctgctccagttaccaggcggtgatgccgcacttcgtgtgcctggccgacgagttcccgcagcccgtgcggcccgccaagctgcccaagggccggggccggctgcggcggccgcgccagtctcgcttcaagacgcagccggtgaccttcgacgagatccaggaggtggaggaggagggggtgtcccccatggaggaggagaaggccaagaagtcgttcctgcagagcctggagtgcctgcgccgcagcacgcagagcctgtcgctgcagcgggagcagctcagcagctgcaaactgaggaacagcctggactccagcgactccgactcggccctgtaaggggcgccgcccgcgggggggacgcgcgcgtccgcggtccgcgcggggaccggcgtgtgaaccccgagagtgcccgcgccctgctcccgggggacccgcaaggacccgggaccgccgctcctcgcgcgctcggactcccgccccgctgcgaaccggtcggtgcgcccctcgccgcgctcgccctggcccgggagcgccgggagcggggccgctttcctcgtccttgtaaatgtttattttttaactcttcccagtgcgaactctgctgtgagtgtgtgcggggaggcgcgcccgcgctgagtcggcggcgggtagccactccatgcccttgtccgatggtttgcaactccgattttgcacaccgctccaccgtgccccccagcgcacacccattcacactcacgccaacactctcgctgaacacttttataattgttaggcgtggccgttgggactttgggcgcagcgcggctgctactgcgtctggaggattgatatttatttttgcattgcgatggctgaaggcatttatttaacgatctttttacctggatatgtctgtgaggctcctgaaaggagacaaataaagtcaatatatttgcacagtgcagttttccaggctcttgactttttgcaccttcggggtccaggctcccaagactcggggaggtgggggaggaggtggcagggggatgtcggaccagggagccgggagtggagctacctccacaagcttcggtcaccggaacgaggttgcgccaccggtgcgcgggtcggttgcctgcctccccaagtggatccacccccggtccagtgtgctcctgcgtccctggtctattccccatcgccggcatccgggctgaagtgaagccgcaggaggggcggaggcagagctgacgatggagagctctctcctccgtacagttcacttcccagagctggggtcagggtcctcgccccgcacccgccacagaagacgcatctccctctgcgctgattcctggcggcgggtggggagatgtcggagccagcaatgcgagatgtttgggcgttgggacccgagag

SEQ ID NO: 177 - DNA, 41490 bp, Homo sapiens
ggagcctgccgctccccgcgctcgtagcgcgggcctggggactggggatcccgccgccgggccgcagcatggggcgcttccgcgggggcctgcggtgcatcaagtacctgctgcttggcttcaacctgctcttctgggtgagaccaggagccgggagggccggtcagggcagggggccgggtggcgggcgcggggccggggtccccgagctgctgactgcggcgtccgagtcgcgctcgtggggagggctgggtgctcaaacgcggaggcgaggagaaggcaaacaaagagggaggggagggatggaagggagagaacgggaagacagaaggttgatcaatgagaaatggtgagaaggggagagacaccgtgtggctctttcctggaaggaacccccacctgccttggtttttatctcccagctagtgaccccaggtgcggggacccagcctctcctcacctccggaggacttgggtccctgttcccctccagtctcccgtgcacacacccccttttcactctgcctaccagctggaaccagggcctggccagggtgatgggagagaaacccctgccctggggctgcctggggtggtgctccattcgagtgtgtggacactgtacctggctgtgatggttttgtttaggaaattggagataggagtgaaaattgtggtgggggggcgtcgtcctttttctgggcatcagggtaagagtacccctgggtgagaggaggtggtgggttctcttctgagaaggggatggggaatggaagggcttctaaagggcagcagcagctctccacaacccccagccgcagcctctgctaaatactaattctcccagagatgatctcattcaactttgcagggtttgattgaactgacagcgttcccaggattcatggttcacagagagataggatcttgacccttgtctcctatattatcgagacagggatacagctagaccagacctacatccctggataccctgtcccagggcctgcaggactgtgagacaaggtctgaaaattgtcttttctgcacatttcctcttgggctttcttaagagaatgtcagccagtgtaactgctcagctagaccctgaggggaaacattggataaagaggtttgagagcagccagggcctgggtgctttgaaactaccaggttggaggaggtggctgtcctatctgctctgggggacgttgtcttcccatgattgcaactaattaattattgaatgatgggctcctcttttgtctgtcaatccattagcccagatgcctgggtgacttcagcaactccaagctcttcagtatccttcagcagtggaaggtgtgaaggaggtacctcctcgacatcccctgaactttaaagagacacatggcctttgtacacgtggggatttacatcaagcatactatagggagaggcgtttctgaagaccctttatgttgtattttttaggaatctggcttaatttcagaagctgttaattatagatgtcacgccacagtgacaaccttcattctcactgcttatgaattcaaagccttatgaagttttaagcctgaggaggaattcttaagctgggttcagtgcttatttagtggctgatattgtaccagcctttccagtgatagctggaaggattcattgaatgttttcaatgtgtcagggacagtgctaagcatattactttcattattacacataatcctcacaagagtcctgatatacatatactattattatccccattttttacagatgaggaaacaggctcaaattggttaagtcacctaagatcacacagctagtgagtggcagggatggtattcaaactcagcctaccttctctttttttttttttttttttgagacggagtctcactctgtagcccaggctggagtgcagtggcccgatctccactcactgcaagctccacctcccagatgcacgccattctcctgcctcagccgcccaaatagctgggactacaagcaccctccgccacgtctggctagtttttttgtatttttagtacagacgggattttaccgtgttagccaggatggtctccatcttctgacctcatgatctgcctgcctcagcctcccaaagtgctgagattacaggcgtgagccaccgcgcctggccgcctaccttctcttaagcactgtggtacattcaattaaccagtggttctcaaaagtggttcctgggccagcagcatcagcatatcctgggaatttgtcagaaatacaaattctcaggccgggcacagtggctcatgcctgtaatcccagcactttaggaggccaaggcaggcggatcacctgaggtcaggagttcgagaccagcctggccaacatgatgaaacctcatctctactaaagtacaaaaattagccgggcatggtggtgggtgcctgtaatcccagctacttgggaggctgaagcagaagaatctcttgaacccgggaggcagaggttgcagtgagctgagatggtgccacattgcactccagcctgggcaacaagagcgaaactccatctcaaaaacaaacaaacaaacaaacaaaattctcagctcatcccagacttgctgaatcagaaactctgggggtaggatccagcaatctaatttaacaagccattcacataattctgatccatgctcaaatttgagacccattctgttaaacaatgattaaacaaataataatttataaatataaacacagttccctaagctgctcatctcattgaggaaacgagaccagtggatatggaacaacacaaaaataagacagtgtggaatcaagtgacaagtttcacactgttgaccgtaagcacagtaaggaaaggaagtaggagcagtgcagttttaagtgcttgaatgtgttaaccagtgaggttagatccgaccttctctatatgtgatctaagtaaggagtttagagaaaggatcacagtcatgatgaggagccagaaaagttctccttaagaaggagctattcgagctaaacctggaaggactggtagaatggagctgggcaaagcgagggggtgacgcaccatccaccagcagaggagcagagcaagggggagtgtgcgccaccatctgactgtcgaagccatcaggctggagtgcagagatcccaagcagggcgtgcctgcacaaacagggtgtacttgagcaagttattgttacttctaggcttgttttctcatctgtgctattggagtaacagaaatattgagaggattaagagggaatatataaagtatgtgacctcaacttcctatgagcctaggacatagtaaatgctcaaaaatattaattattatttttgttatcggcacataggaagcattcaataaatgttagctctctttctcctgattcctttcttggtggggaatagtatataagtttgccaagtgacttgccatttgtcttcatttgaggataactacaccttatcttgtcaatttgtacttgtggattttccccactagaacttaaaacactctgagagcaggaattttgttttttctgttttgctcatagctgtatccccagtgctagaatagtgcctagcatatagaaggcatgcagtaggacatgaaggaccttcctctcccccagtttcatggggggtgggggtggaggcagcaactagagcgaagaggcaactgaaacaggcacctcatgacttaagggaaagtgtgggataaagtatctagatatctgccttcactgtaactgagggaacctgattccagaaaagccccactcaagtttctaaagttgtttttttgtggttggagggcttcgtgggaagtttgggaaaggggtgggggatagttttcctagaaggccagactttagctgtgactgaagtataaatttacacacacccttagaagctcatgtgcctgcccctcggagttacggggttccttgggtgacagcacttccttccaatcagaacctcgccagaagtaagcatagaggtgggacaggttctgtttggtgatctgcgatttaacagatcaatttgcagcctcctctggcagcttgctttaagtttccctaggctgtgctcctggtttcataaacatacaaccaggccctgccagagccagcacagtattccctggcccagggccgctgactgtactcaccactgaatttttaaaaacaaaataaagcctagccattaaccccactacattaatttctcttatcgtggttgatgtcaaatgtgaaacccctcccaacatctgtcatgtctaaattcagacctgcgatcagatagcacagcatattcctgtgcctttcattgaaatcacctttttttttcctacgttgcatagcaatataaataaaacactacacccccaccaagccgcatatgttggcttaaaggaaaacctgggcgctgtttattccttggtttattgttgtatggtcagtgttttcctatcattgtgctgcactagctgctcagcgttactgacccacaggaagcagagctgttcattgttgaaaagcagattccatatatggcaagtctgaagttgccctcctttccttctcaccattattaatacagctttgggttttcacttggggatgcctaacaggtacatttaagaaagacagtgtcttgcaggcttgggagtcaaagaagtttgactcacatgaatctcatagaggtcaccttccactctttcccaaacttatttcaaacagtaacttcagagcaatcacctgtcagagacattggtttaggaaaaaatacctaaagaaagtattctttggagaccagcccataaggcagataggaatgttctcagcctcgctggaggagaatcttcatttctgatttttgtcaaggtggaaagagagtaccaggggccagtgtcccctagtgtggacctagaattgctaggaggaacagatagcctacaagaggggacagtctgaagaagccacagctatggtgccagggttccggtagacctcggacagacctatgcagcgtggcagttcaaatccaggaatccaaaacctgggcagtggatactgacatcatactgcctgactctattcctgcctccactctttactacctaggggactttgggcaagttgtttaacctctttgagcctccattttctcatctgtataatggacataataaactactaatatctgtgaactttgtgcacataaaatgagttaatatatgtaaggttataagtatggttcatgcatacagtaaataataacatatcagtaatagttgtttttaaatactagaagtacaaatgggaaagtagaatctagaatccaagaggttcataaagtcacaacaaagcaggcaggtgttttacatccagctaagcaagcaaggtagcaagaggcttggagtttatcaagggcatggagtcaaaaggagagatcacttcctccaccgttccctgccaagtgctgggaattcaaagatgattaagacacagcccttgatcttgaggcactcatgcctttatttagcctccattttgcctttgattagaatttattccctgtttagtctttgctccttgagggcagggactgtgtccttttggcatcccctttctcccaatccctcagtacctaatagagttaagcatggctccagctaaggtagttgtgtgcactgaccctggagcaggatctgtttatttcctttcccacttctgtgctactaagtggaggccaaggaaaagcaatgggaaaacctttggtgatcagtgcctctcaaactttaacgtgcgtacagatcacatagggagcttattcagctttattcggattcagtgggtctgcatttctaacaagctcccaggtgatgctcgtgttgctggtctgggaacatgctttgagaacccctgttttagatgtggcctgaagaggtcagagattcagcagtggcacttgtttctgactgaagcagggtgtgccctgcttcttggcttactcacttggcttgtttttggcagttcttttaatttcagttaccactttacctttattaagtctcttttttacgctaatacttgatgctttctggaattaccgggaggccacctgtccattgttcattgcatttcaccttgttgttctagaacatcagccatgaagtgtctttgggtctccaaccatgtgtgacaaaagagaacgtaacctctatcccccaaccttgacagttaatatcgcgaagctgctcccttaaaacaagtgatgctatactgagcactgaaacaaatcatgtcatggttgctaaggaattaaagagagaatgctgccagcaagatggaaataccagatgggctgggagcacatcttacagatgaattaactcgggttaccttggcctgcctttttcatcctctttgaatttgattgggaacaaaaataacaatgcttcagtttacgaagtgctttcatatgcgttatcccacctgatcatgaatcacaacaatctcacgaaatagtgtaattattcccattttacagttgtgaaagctgaaagtcaggcacagtaggtggtatgtcccaggtcttctgactttaaaccccatgcttttttcattgttttaatttattggaacgtgtagaatataaggtataagaaatgctgctaacttggaaaatctgaagcctgtgatcagggagattatattcagtgtcagatttagtcttgatgcattccagaaacaggtacaaagagatgcctaaaaatactaaggcatatgggagaagaagcaggaaggagagaggttgggaacactgctgatcagtttcaggcagaggaaaagtaacatggaaattgagaaagggtatatatcaagagacagtttaaaaagttaatttcaggagcaaaaacttgaagaatagtaagcactatataaatgtacactatgtgccagctgctttcctaagcatttattaactaatttaatcctcacaacaaccctatgaaatagtagcagttatcatccccagtttacatatgagaaaacagaggtctgaagcattgaagagacttgagagctggccagtggcagagctgtgtctctatgtgtgtccccagagtctgtactcataaccactccaagtctacagactatcggagaggaaggttgaagctctgacaaacttgtgaattctagacctgcactgtccaatgcggcgactatgctactgatcacatgtagctatttaaattaattaaaactaaataaaatgtaaccttcattttctcagtcccactagctacatttcagagctccatagccataggtgcctagtggccacaacgctggacagcagagatataggacatttacatcattggagaaaggtcttcttgacagccctagcctaaatatagttattctttcactcataaatatatctattcatatttttctcttatggggtcttaaaaacattaaagagaggagacatagtttccacaaaaggctactgactttctagtatagaagatttagaaaaccgaaaggaattccagctgtcatggaaagagggagtgtggatctaaaataaaaattagtagaggacggctgcagcaaaccacattattggaaccatgggagcgatgtttcctatcttgaagattaagcttttggtttgaaggtaacattagcaagtctaccaacataatagcacaaagtgtgaggcacttactgttctcagtgtgtaacatgaactcatttagtctctttaggaggcactattattaccttcactttgcagatgaggaagctggggttagagaggttaagtggcttgcccaagattataggaccagtaagtgccagagtctgattcaaacccaaatgcgtagaacccccatttttatccactacaactcctttacacctacgtaccgtatgcacgcatgtgtttattaccctaagggcatcattatatattctgaacacccagaagaggtgaatttctagaagaacagttggcagatattccaggatgtgtaccaagctctgtcctccacatcgtaatggtgattgggaaagagtcagcttattaacaggggtggcagagcaaggctgagcagggccaggggtgcattggaagttgctgtcactcatccaggaagccgactttgtctccctgctcccgccagagtctatctagccttctgtgaatggaccagtgctgcaccttcctgacctcaaacaggtcctggtaaaatggcttttaagaaaaatctctatagagcaccaagctagactttcacaatttctgctagattccacccatgctaacttcttagtaaacaaattgttttggcttttctaatctagccttagttccatttgaaacatttttttaaccactgtcattctgtaacaactaaaactggatgaagatcattatttattgatcaataattaagaattgtttatctgctccaaagtagttctcccaaccactataaataaatattgtttaatgtgttgtctttgcttatgtaaagctctatatagatgagatgtcacagtagtcattgtggcctccaagataagtgattatatatgcagagggcaggcctaggatgagagccagctggatgttccaaggaggaggtccgctgaacctagaaaagaccatttttttcctctccgggcttatccccttgatgaggtaagtaaggcagacattgagttcagttcacttctgtgacttggtagaccagattttagttctgtacatatttgatcttcatttgagaaagccatctgctccctggaatccttagccagtagtctatgacatttcattttgctgtatagtataaagaagactacataggctgggcatggtggctcacacctgtaatcccagcactttgggaggctgaggcaagaggatcacttgtgcccgggagttcaagaccagtctggacaacaaagtaaggccccatctctaccaaaaaatagaaaaaaatagctggatgtggttgcacatgcttgtagtgggaggaggaggtgggaggatggattgagcctgggaggtcaagactgcagtgagctgtgatcaggccactgcactccagcctgggcaacagagtaagaccctatctcaaaaaaataaaaagcaagaaaactacacagccatcgtctttctcctaattcttgatgttccctaatctccttctccttctccctgtattgttaagagaaaagacattatgtataatcaccaaataaacaacacattttccactgtctatatgtaaattatctgctctatcatttgcagcaagcttttcatcccaagttagtttccttcccctgagcttatatttctccagcacttctaaactgcccccagcaatgttggttgacccatgcaagttaactttataacaatttaaacaaactgaaggtgcatctggcacaaatgtatagcccagtgttctttgcagagatgaatggaacactcctgattttattgtggcctgaattgcaccacccttccatcactgcagagaattaagcattggtcaattataaaatatactcttacctgaaggaagtttttcttactgtgagctttttcttaggaaatggcatgaggaaaataatggggagatcagaaacactggtacctaaaggagctgccatgcatttccagactaacacagccttctcatcgccacaggctgccacagtcctgcctctcagttcccactcacctggtcctgatgaaggccaaggtagtgaggtccttcggagaccatttgacatagatgtcatatggcattcaattcttgtattttttctgataaaacccttgattttgaagaaatgccatctgaatccttgacttgcttttactgcataacagaataaaaatcttgggagctggttttcctctttgagaaaattcagatcatcttccagagcaaatgtgcttctgacttttgcctgctaagagggtgagactccattacccttaaggtatcataatggggtttacaatcagatcaataatcataagtgctcattatgtgattccaatggggatgagaattgccaccaagagcaagtattagcttaaaagcatttaatgaaaattctagggttgaagcatcatttccaattttgtgacttcatcccaaagaagagaattgcaaatgagttggtattcaccctggagaagcaagaatacagaattgattttgttcattctttcatttgagtgcagcatgcgcgtgtgtgtgtgtgtgtgtgtgtgtgtgtgtggcgctataattgtattgtgttcatatgcccctgccagtggaaggcatgtatacattgtgtagatttacattgtgtagatttattctttgtatccgtggatggtacacaacacacattcctgcaggcttaggaaaacacagaactgatactatgtgctctacttttgttttctgtttctgaggcatgtgttttgctgagcatattcaacagcgtgttcacacagtgccttcgaaggtatctgcagtgtttcccaggtgcagatgagtttgaaaatagcactttgtgaagtattcccttggagacttgtgaaggaggttgttcgcaattgctcctgtcagcctgtcttaatcagctcaagctgacattttaaaaatataataccacagagtggggtggctgaagcagaaatttatttttcacagttctggagactagaagtcagaggtcaggtgctggaggttggaagtcaggttggattctggtgagggctccctggtgagggcttgtggacagctaccttcttgccatgtcttcatatggtggagagacagaaagcaagctctctggtgtctcttcttataagggcactagtccctcatgatggccccaccctcatgacctcatttaaacctagttacctcccaaagccccaaccccacatatcctcacactgggaattaggcctcaacctgtgaattttgcaggttggagggatacaattcagtctatagcatctttgtgaaggtcctccattcactcatttagcaaatgtctattgggagcccactctgcagggcagaggggattatgtttgggaaacagcaatatagaccctgtccctgccctcacagagcttaggccttaatttacaaaatatgggcatatttaagtagaaaacattatgtgagatataaaagaaggtacctatctaggtcatggtaggcttccctgaggaattaatgttagagctgtgaatgggtgtcagctagggggaggcggaggagggaacagcaagaacagagacctccacaggggcaggaaggatctgaaactgtagctggagcatctgagggccaggacctgtgtttcccacttaggtatcagtgcacatgctgtctagaacttccctaaatgatgctttttacccccaaagggggcttttttgctggacttagtcactagaaagtggatagcaggtatttgctcttggtgatctggttggctaacctccaggaaaaggaggacagctgggcagactggggaggccagaatgaggaatgatctctgcattcttgcatctcagcaccaccccactccaaccgcagcgcctgcctagggaccatgtttgcaatttgtgaaacctgtctttttttaaaatgaaaaaatatgtcctcaagataggacatctcatcagcaatcccaggaaatggaagtaagtacagtaaaataaaattgaaatctattagcaagctctgcttcatgcacgatgacttttttttggcagatagccattattaaagaaaactttttgtccatccactttgctttaaatgctttctaatcaagttttcagtccttcttctgtttcttgagttttagaacacacattgttttcactaaagacatatgcttacaatttgcaatttcgtgtcctccaaactctctggaatatggttagctactgaaagaacttgcccaagacaatacgtactataaccatatgtgatgatcccctatttaatgacttggaattattgtcactatctattcctttccctgcattcttatcttctttttttttttttaagtatttttcttgtcctctttttaacagttggcacactcttgcccttaaatactattttatcacattctctgagtacctcacatacaaccggtcctcagaaaaggaatgatgaggctgggcacggtggctcatacttgtaatcctagtactttgagaggctgaggtgagcagatcacttgagtccaggagttcgagactagcttaggcaacatggtaaaaccccatctctacaaaaaatacaaaaattagctagtgtgatggtgtgtgcctgtattcccagctacttggagggctgaggtggtggatcgctagagcccgggaagttgaggctgcagtgagctgtgatggcaccactgtactccagcctgggtgacagagtgagaccttgtcaaaaaaaaaaaaagggagggaggactcaaaaaatggtgctttctggcaatttctcatgtgcattctggtgggctgcctctggattgacttcccacctgcagggttggattccctcctgggccacccagtggggattagcgtctccttgagccccagaagaaggactggactttcctcatctctgaaaccttggcttctgactcatagtagttgctcaataagtgtattttaaaggattaacatcaaagtccaacttttgcttctgtatgaaaaagtccatttccagaaaaacaacaatgtttctagttgtaattgttccaaaggcacagggattggcgctggtcctggaagcagggcagccctcagcaaagttcttcaatgagtacagtgagttcgtagttctcacagctctccacgtccactcccctggtgtcctgtccctggtcctcagccattcaagcctttccctttggctccctgctatgtctgacctccaggtaacattcatgctcctgatggtttccatcaaagtgtgggcttctgtccctcctcccctcaggcagaccttgctatgggctttccaagatggtagcaaacaaagtagaagccgagtcatggtctgtcccacaccctctcaagccccaacctccgacctcccccagactctccttaacaaacacagcatcgaggtaaggaaatgaacctctgtactaccatctctgcctggaattcgcctctgctgccagtcgttccttgcccagtgacttctcactcattcttcaagatgtaaattaaaatttaatgattcctcctgcatgccagtggctacagtttgctccaatcccttggcagtgtgcatgctgttcctcttcagcacacttcctgcattatagtgcacttagtactttatgtgactatctaccacattagactatgaaccatgtctttttcatcatcgtttccctgacactgagcacagtacctggcctggactgtagtttattcttaataaacatgcaaggaagaaagacagggaagggagatgtggctgggggcagaagaaggaaaggttaaaaaaaaaatggtagcctcccatttcttatttgttttaacattggctgaggtgcaatgttatgtctgaatgcaagaggggttgagactaaagggagaagagagaatgtgggcgtgaggcagttttggcctcatcgggttaaaatttaggattagagagtttgaagacttccttcaggtctttggggagaccatttcctccagctctatggaatacagggaatgttgagaacttagtgacactgacatgctcactttgttcctgactggactggaactggtgtgaatttttttcaagcaatttctagtctgtgatcaaagcccagtgaacacagagcattccatgaatcttaaaggaatggcgagttaaaaaggaccaaagtgctgtgtggtctgtgccgatgccactttccagagcagtgatcgccctgtctcttgtcacaagcagcatcaaccctggccgggtccttacccacagcatccctgacacagccggcagcagcctgctgggaggattcccttccacacagtgatgacattcagctaagccacagtttccttgacccaggaggaaacccgtgtggttgggggttaggggcatggatgagcaagcgcagattttttcccattgcccaatggctttaaattgcaacctctcttttaattttccattatgcatcaaacacatctgtgccagaactggacaaatgtattctgtctgggaggataatcccagacagctataaattagagtttgtgtacagagattccaaaaatgtggcctcgtggtggggtgtccctgggaccagtcacctcctccacagtctgctcggtggctgctggctttggcctgatgcctctgtcaataggtcttgctttgtatttggaaactctgtctttccattgagtcgccacagagatgagggcgtgcagggttgcctgtgaggctttgctgggcagacttgtcccaggcagcctccagatgcttctaggaggaacctaggtgattgaccaagggcattgctctctttcctacacaggaacagcaaggacctcaaagctggtgtcctcccaagttaaagcatggcccaagaagactctccccactttttctggattgcacatagaaactaccgtgtaacactttaaaaatgtatttttaaagttacaagagaaatacatgcttaatgcagagaacttagaaaatatactgagaaggaaaaaagtcacctggaatcctgtccttcataaataatgttttagcaaaactcctttcaatatgtttccatgacatgccaccctttttttaaatgcagacgtctttcagaagctgattgatcccgggtcctttagctgcccctcacattatccaattagtgctttcctctaagtactggaaacttttagttactccacaagggagagtccagctggtagaattctgcccctctgactcctcctcactgaggtcgcacctcttttctgaagaagctggccacaaaggggattggccttgggagatagaaggagaagagggataaagtcctcatagaaatccagccagatcgtccagaaggctagttccgggtcctttataagctgcctggcaagacagaagtcccctgtataaaaaggactatgctgtctctggtgcgatttttccttttagacctctgcttctctgatttccatcctccatgctcctgttcccagcgtctgtgtgtgctctgctctgtttgggcaggggaagcctctaaattgttcatttagtggtagactagggcagcccaacagcaactggatgggctagcagaattaggaggctatttttatatctctgcttactttcccatggtgccctgggcccagaaggtgtccagtaaatatctgttgatggattgatacagtgaaattcgagagtggtgtttgtggagagaaaacaccgtggctagagcctgctggcacgcagcaatgacagtcctgagatggcagaaagggcttccaacttccaagctgagcctcacaaaagccttcagagtagggaaggaaaggaagccgggtgatgactctaccagccgccagcctgcctagccactgcctgtgccagccactcagcctctccatgagccacacagcacacagaccacgctttttcagaaaattattttttcctttctcactttccatggaaactcaaaatagcaaccaaaaaaaaaaaagactaggctatctccctaccagcaaaaccatccccagtcagggcagtgaccatataggatggtggagagggttacaaatgcccctaaaaccgctttctatttggggactgtgcactcacgaggtgtgggtgggttctgaggttgaggttgctgtattttcttcccattcagaaaagtgggtttcccccaggtcttggagttcatcgtgctcttggtgacctggcagctgagacatagtcacctctcgttgtggtgtgggtgaagagatccaacatgcccagcaagggacaaaaaggcaggggcagatgccttccagagggaatgttattggaacattgcttttgagacacctccctggctgtgctgtgtgtgccccataaccacagggcagcctggcatcatggaaaaaccctgctttcagaatcagaaaaacccagtccaatgtcacatcaggggcctgaggggcttcgtgcacatcacttcacctctctgagccttcattttctcccctataaaatgggaaggtggtctaagtgatttccaaaggggtgaccttgtcagcatcctgtgcctagagcctgctctcggatctgtgcatgctctttccccttccactgtaaacacagtgtcgtttgccttccagctggctggatcggccgtcattgcttttggactatggtttcggttcggaggtgccataaaggagttatcatcagaggacaagtccccagagtatttctatgtgggtgagtgactccagcttcctaagctccagctcagagtagatggggctgtgcaaagacttagagcagaagctgcacttgaactttggtgggagggggagggcagagaggcagggaaagacgctgaaaggagccacctctgagcccctgtgcactggtgtagccctccgagttgtctgctggagacaggtagagaggctgtggtgaccccttccccttgccctcacacggtctgttcctccgctctccaaaatcaagggagtctggggctggtaagagcagcctgttgtgctttgtttcaaggaaagaagtctcaaggaaatgcagctaaaatttatttcaaagaatgagaaaactccctattgcccctggagtaaagtgggtacaccacaagtgtgtcattcactagtctatatggggtgacacgggacccctgtaggattttattttgtgatcttatattttaaattgtctaggaaaaaacataactcaaaatacaggtttgaaggtgctaatctcagtctctccatgactagggactgcagagtggaggggaggagagagaagaatgagggagaggagggatggagggagaggagatgagagggactcccctgggaagaggttccagcaggaaggggcaatagctctgaccccacctctgtaggaaggggtgaggagtgtggggtggggtgcagcctccacccgcaaggcagtgttcttagtaggggctgagcattgttgccctgggattagttgacctaattctagcatttcctgtgacctttcctcattccccagctaagtggactaagactctagatttcaaaaagcccaagacaattgtcattaaaggtggcacccccatatactggctgttttaggatctgcaccagccatagagtaagcttcagttgctgtggtgacctctatggcagggaggaagagcatcctgcacaggtcatttgctctaaatcacaagaagagtagagtctcttccatgagagagagagcgcaggccccactcagagcagggacatcctcccgaagggccagcctgcagctgtgctacctcttattacaaacactcttcccacacagcatcctcctgcgaggaaaagagctgtgtcagttaggatacttttagaggagagtagcagaaaacctactaaagatggataacaataaggacattccacatttcaggaaatcttagatgtggctctttgtaaaacactcaattattttaggttccattaagaaaggaaaaaatgctaccagtttagcttagctatgacataccataaaagatgcattctaatttcagcattgttaaaatataccaaaaaataaatcatctcaacagtgatgaaatatagtaaaagaagtctggagatggggactttccagaattcgttcagagctgaacaaagtcatcaaaggcccaggttctttccccctctctgctgtcttcagtgtccttagacatctccccttaaaagatagctgcagtggctccaggcatcgtattctcgtacagcaacatccaaaagagaacaaagcaaatttcgcttcatagggtcccttttttgaatgagtaaaacctttttcagaatctcccaacacatttccccttgcagcttattagtcaaaattgcattctgtattcatgcctaaaccaatcatggccaagaagcgaattactatgattggatctctgactaattgatattcacaccctcacaccctcccctgggcctggggaggggcctgggctccccataggacctgtgacacttggacaagattgggattttgtgacaaggaaaaagcagaggaatctgccgtagacataaaactgaaatgctcctttctacccacatggtttccaggaagtatgcacagggcaaggacatttgagacaaaaaaatataacctatcagtataacctaaatataatccattggccagcattcacagtcctgggctctgctgtcacacaaaaatgtataagaattctgtaaccgcccccatgtaacttgtaatataaatgaaaagactcatagacttcacaatttaaattacaataaaaattagtatgtgactaaatgccagctaagtggtatttgcagtgggtgcattagaggtcattctaaactggtaaggaaagaaggatttaagttaggttttaaagaccaggctgtaatcaatggagaagaggaaaaatggggactagaaaggctgaggggaaggcatgcacaaagaatggctgtggggagggattagcaagctgggaggggctgggggctctgttggggtctgaggactagggcatggtgggcagtaggatttggaatgttggggagggaaaggggacaagtatagaggcctttgaatgtcagggttaagttggtaaacagtagaagaatgatttggggccgggggtagggtatgatctgcactgtactttaaagagattattatggcagaagtagaatgaaaggggaatcccaggacagaaaaaaaaaaaaaagcagattattgatataatcaggccggacaaattagggtataacccacagtgattgcagaaggaattaagaagaaagaaacagaaagataagaaacattattaaacatttttaagcctgcctaatcaaactcagggacagaagaaatcaaaatggcaaaagaggtagtgagaggcagagtcaagcctctcagtaataattcatgactttctgatggaaacctgagttacaggtctaagtaaggggcccccgctccatcagagggaggggccgttgcgtggcgctacagatggaagacctccccgggagcaacctcagtctgtgtttctccagaaacaaagggctgataaccatttcacagctctagatgtcagttccacataaaaacctttatgattagatacatcaaaaggttgaatagacttccatagatgaaagtgagctctccttcatgtcatatttaaccactatcgtggcaagaatcagaattgtgtgtttcattcaggagattcctgtgttgagccagaggctgaactggctctacacccacattcctgattttgtttctaatctaaaccaaacaatacacacactgcctgagatatgaggaattcttcattatgtcatatctttatggacatgtctatcaggactcttcgtattgcaaatcacagacacctactcaaattgactaaagcaacacagacctttattgacttacatacttgaaaggtcaagggttaatactggtctcagggactcagatgatgtgaccagagtccagtctggagccatctcttggccctgctttcctttggctccattcttaagcaggtttcttctccatgtgataaaacggccgtcagtggctctaggctccacttccagagtgactccagaagtagaacctgcttttttcattccaacagatgcatgtaatgccccaggcctaactctcgttggcagtattggacctcgtgcccatcctcgaacttgtcattgtggacagctgcttgtgggcatatgcctgggcttcatgcccaccgtggagctggaggtgagtcagccctctcaaaccacatgggctgagaatggaggagttccctttacctaatagagaaaaagaagtggattctgggcagggaaaacagcaggccacagcagggcctgaatcctcctgcttgctcttggtgtcacagggcatgatatgggtttacccacctttcgttcctcgtccaccccatctccctttcctaaggcagcccagagtggttggtggtaaaggcactcacgatccatgctcaaagttcagagaagtgggtcatcatagaaacttagcaccacgcagaataaggaaactacaggctgtggataaacacctggggctggcagtcagccagggcttcccagctcctcctggtggggcttggcctggaacccaggtttgctgacagccaggtccgtgcttgccctgtctcccggtgctgcctctctggatagtggcaacaagaagtccttgtgaagtcaggtaccttttttccctttcaagtatgtcttataatataaatagaaagacaatagacatgtttgtagaaattgacattttttcctcagtaaataattttccacataagatacctgctctccagcaacaaaacaagaagaaaaatacactaggatgctgtttatggatttgcacaacatacagtatgaggtgatagcactttaggaaacaaacaggcccagtgtttggaaaatctcactccactgtcacagggcaccattcactgatctgggtatttccttttcagaataggttccagataaatcagcccattaaactcttatcacccctttgttaaagagtgtcctaaacaggcatggcacattcaaatggttcttaaagaaataagcccttccagccttgactctcctctctgagaggaaccccaggaagacacacttgtctaggtccctgcttcggggtagatgactgccagactttgtaagggaaattgtcccatcttctgggggaagctttcctttctggcatccttggttctctttccttggggatggagcgagtttcccttcctgtgataaagatcagacataacctccaagccagaggtgtggtcaatcccagggcagggcaggaggatccagctgtgggaaatgaggacagggcgagaggatagtcagactgactgccacctgtgtctcttctcagggccctctgcatccaggccaaggcctggaggcccttccaaagtctctgtgtccactggttgctaagggtagaagagaggacctggcaggagtgacgctggcagaggagggcttgggttgctccgtgttgcctagaccttgtccacgctagtctctttcagggcactcttgggagaagcccccgtgtcttccaaattccagcaacctgcccatctgacttcctgttacagtccctctctggagtgggcagacaccccaggggtcttctttctagagttacagagtagggagcgagcccctcagcccttggaaaactggagagactgtgtgcttggtgcatgaagtcatgtctgtgagcagaggatattaacaggttttctccaagaaggggttgcccacacacgcaggagccactcggctctccaggatcgcagcctgactgcagctgtctctccctgtggaactcagagtctccaagcctggctctgattgtggctggatgttatgtataaggaaagcattccagtgccgaacaccaagggggtggcttggcttgttaaaaactctgactcacgctggtcatatttttttacttggttttcacttgtacctgacatccatggtagctgtataccagagaggtgttgtagcttacattgttgagacaatttctccagagcatttttataagaagttggaatagacaatcatttccatattgcagctaacgaaactgaagggtaggaagacttacctcaagccatagttggcaggcctggatttctggctcccagccctgtactttcagaggaaaaaccaggaatcatcaattctagacatctcaagtacttttctcaagggagaagaaaaataactctactgccatttataaattgcaaaatgaaccaatttctagctaagagcattgttgttcttcacagttactgctaaaacgaaagcataggggttcagggactgcactttggagtaggctcccctaggttcagttccaatttttcccctcacaagctatgcaatcttacataaattatttaatttcttggtgtctcagattcttcagctgtgaaatatgaacatatttaagcatagtatctgttctgtggtgagccctcagtaaatattggctattgttattacagatcgagcatccctaatctgaaaatccaaaatccaaaattcccccacatccaaaaccttttgagcactatcctgactctcaaaggaaatgctcattggataatttcagatttgggattttcggattaggaatgctcaaccagtgtaatgcaaacattccaaaatgtgaaaacatcctaaatctgaaacacttgcccttcccaaaaactaagttgcattcaatattctagatatttgcattattatatgcattcaggggatactgaagggacataaatgtagggacataaaaaaatttcaaataaaaaaatggtcattagcagattatgtaaaaccatctgctgctagaaagccattaaaattgatgaccacgtccagtccctaaaaggggggaaccacatttttaagtgagtttatcccagtaggccgttaggaggttctctctcatttttatgttaactaaaatgatgtttctagcttaaaagaagactctgaaacctaagaaaagagtgatggaattgcctgggaacatgttccatatcttaccccagctagaatgactattatcaaagggagaaagaatagcaaatgctggcaaggatctggagaaaggggaagcctcgtacactattggtgggaatataaagtagtacagccactatggagaacagtatggcagttcctcaaaaaataaatatagagctatcatccagcattcccactgctgggtatatatccaaaagaaaggaaatcagtaaatcaaagagacatctgcactcccatgtttattgcagcacttttcataatagccaacatatggagtcaacctaagtgtccatcagcagatggatggatgaagaaaatgtggtacatatacacaatggaatattactcagccataaaaagaaagaaatcctgtcatttgtagcagcatggatggaactagaggccattgtgttaagtgaaacaagccaagcacaggaagagcagatatcacatgatctcactcatgtgggaactgaataagtggatctcatggaggccgagggtagactgatggttactggaggccgcagagtgtagggggttggggagataaagagaagctgcttaatgggtacaaaaatacagttaaatagaaggaagaaattcttgtattctatagaacagtaggaaaattatatttagcaataatttttatatatttcaaagtagctaggtgagaagaattgtaacttcccaacacaaagataaatgtttgaggtgatggatatctcagtgacactgatttgatccttacacattgtatacatgcattgaaatagcatatgtacccccaaaatgtgtacaactattatgtatcagtaagatattaataaataattttaaatactttttaaatttttaaaaatgaaggtgtcccagggaaagtacttgtggtagcatgtcacagagatcactggcatcccaaaggccagctattcatgatgaaaatgtaatttcaaaatgttttctatttttcaaatcaaaggcaataggactcggaaagcatgagggctttgggaagtaggtcgtatgtttgtcacacctgctcctgtgggaaggagaaggctctacagtaaccatcttggaatttaaaatgtggctgtaaattaattattacattcagcagctattttttgagggtcagaccataagaaggataaagtatccttggaagccacaggtggccttatggcatgcggagtattagagccagatttggaactggatccggcacgcccagggaacctttcctcttgtagaatttcttctgcttttcccttcagcttcagcaagcaatgttcatttggagctgggctgagtcacgggcccacacatacaaaacagaggctggctgagaagtggcctcaaagttgaagctgctagggcagcttcaggttgtttttgccgtgagctctgggattctgatagcctaagaatgaaatattgttcaaaaaagcacactttcctgaaaagctcattatttcagaaggataaggattgttgcctgagggagcagacagtttcatttacagtggggaacaactctggcctcctcaaacctctgtgcccctgtccagtgagcctcctgcctcctcacgagcctccctctttcacatattccagggtgtctcggggtgcgaagcaaccatcctcatgtgcttggctttggagagcacagctatgtagttgctttgtggatgtttgctgagacctgtttccagcatatatctctaagcaaagatgggtgatgacagccagcaagcctggaactgatttgattttctctgtcttatctactaatccaatgcacactgactaagaattctgccttgtgcagggcatgttctagagaggatgaataaggtttgtcaacttgaaatctataatgagagactaatatgagaacctgcaaaagcacaaaatggaaaagagcaggacacagccagatcatggtgaattcccaggtggctggagcataggatggataaagattttgggggaaactgttctgtaggctgtgacttcatgatagatctgcaaacggcatcatgtagcaattgtggcagtagcaatgagaggcaatgggcatgttctgcagcaagggggtccaccaggagacattccatgaaggaactgaatatggtgttgttgctgccgccctgcattcagctcgcttctgtggggtggtcaaatagaagtgtgggatgggaattggggctgcaggccagggcatcctgcctacagccatcttgactctcagacctccatttgtaaaacagaaataatagtccttgcttacctaaccacgttgttttgagaagccaataagatgatggaagtgagagctttgaaaacattgcaacacagtgaatgacttttttttttctttttcaactttcattttagaatcagggggtacatgggcaggtttgttacaaaggtacattgagtgatgccgagattgggggtatgactgaacctgtcactgaggtaatgaatatagtatccaatagttagtttttcaacacctgtgcccctctagtagtccccagtatctatcattcccatctttatgtccatgtgtacccaatatttagctcctacttataagtgagaacatgcggtatttgatgttctgttcctgtgatagtttgcttaggataatggcctccagctgcattcatgttgctgcaaagggcatgattttgttcttttttatggctgcatagtattccatggtgtatatgtaccacattttctttatcctatctaccattgatgggcacctgggttgattccatacctttgccgttgtgaatagtgctgcagtgaacatgtacccttttgacagaatgacttattttcctttaggtatttacccagcaatgggattgccgggtcgagtggtagttcaactcagttgtttgagtcatctccaaactgccttctgcagtggctgtactgatttacattcgcaacattgtataaagtgtcccctttactcccagccttgccaacatctgttatttttgactttttaacaaaagccattctgactggtatgagatggtatctcattgtggttttgatttgcatttctctgatgattagagatgacgagcattatttcatgtttgttgctcgcttgcatgtcttctttggagaattgtctgtttatgtcttttgcccactttttaatggagttatttgccttttgcttgttgatttgtttaagttccttacagattctggatattagacctttggtgaaagacatttttaaaacaataaagtgttgaggtagtggggccaacaacactattatttttaatatgatatcatttctcacattaccacatccattccctcatgaaattattcttttagagaaaagggaaagggaggaggtggtagagctagaacagcaggaaataaatacccacctcaggactgcagagcagcaaggcctcagggccctgaaaagaacgctgaggccaggtccgggtggggcaggaagcagagcagcctcgcctgtggctcctactaggtctgtaaactgccagatctgcccgcaaaccaccatcagcaacccagaggcgccccaggaagcaccctgaatgccaggcccaggggttccccacagaggcggggcaccagcccccaccctccctattaatgggagtggtttccaggtgactcatatgagtaaaatgcaaaaaatgaaatagagaccattaacatgattccaagtaagacaagtgccaagtcccatattgtattctaacttatctcaggatcagagaaggaaatacaaaaaggcttggctttagttctctcagaaccagagcatttctgtccttttctttctctgtaagaactgtacgtggggcttgcctaagcagtaagtgaaatccccacctgaatgatggctgcctccatcactagagatgcaagacagagtcggagtgttgggcaggcttttgaggctcatggctatttttctcccggctctgccaaacaccagctctatgaccttaagcaaatcgctttaccttttggggcccagttcctccgtgtcaaacatggcagtaagaatagcacctccttttggtactattagaatgctctgcagtgcccagagtcttaagcctagttggtcgtggaggcactcggttggctctcagtggtctcctctgacctcttccccacagggctgtatgttctggttggagccggggccctgatgatggccgtggggttcttcgggtgctgcggagccatgcgggagtcgcaatgtgtgcttggatcagtaagtggggcgagggggtaaatggtggggtgggggtgagggagcggcctgcatctgaagggagtcagtgcctctggcccctggctccagctcctccgtggactctctgagcccttggcatgcacttttcctccctcagtcttggtttctccatctcttatatatgaataatactaactagggccgggtgccatgactcacgcctgtaatcccagcactttgggaggctgaggcaggaggatctctggagcccaggagtttaagactagcttgggcaacacagggagacctagtctctaccgggtgtgatggcacacacctgtggtcccagctactcaggaggctgaggcaggaggatcacttaagaccaggagttgggaggctgcagtgagccatgactgtaccactgcactccaacctgggcgacagagcaaaaccttgtcttgaaaaaagaaaaaagaaaaaaaatattatctttgttcctgccttatatgggaagtgtgaaaagaaatgacgtcattggtgtaaagatgttttgggagtaaaagtacttagtaattgtaaggggtgactatgattgttctttaaaaaaaaatatttcacagtgggtgaggcagctaaaaggtttctatagccagggaagtgctgttatctacaaggaaaacatttatgtttgagatcaataacttaaccaaaatccctcttgtggcttattttaacaagcaacctctgtttaaaacaaaaatcaaataatttcaattaactgctatacattctatgtcagtgtagcctgagagaaacagaaaggaagaagaggggcaggaggagagaaagtgttgatatttctccacagggagtcagaaacagcagttttaataggcagcctctcatctctcattacttattgtgatatttggatttttaactctggccgtagcctctgatctcttgctatgtgaaatgtctgacttatttctttgccattcattccttctctttctcctactgttgagcacatttctgtcttgtttatcactgaacttagtttgatcagagcaaatccatagaccagaacagaaatccatccagaaggacacccctcacctcatctcctcaaagaagcctttccagaccacagaatctccagtcacccccttccccatgcccaggccgcatcagtgatgctccctctcctgaccttattttatatctttctaggtcttttgtgttcgtcaagtatttactaagcacgtaggtgccaggtggtgttctaggtggtgggatttttacatcactacctgaacttatcttattcactttttaacttctttacacagttatcgtatattcctctgtccaatccaaggtccgtgataacagagacatttggatattatcttgttcaccactgaatagtcagcaccaaggacagtacctggtgcagaataaatgcctaataaacaattgctgaatgaatgaatgaatgaatgaaccacatgaaagcgattcagccattacataaggaaactaaggtgcaaaatatataaattgaaaaggtattaaattaatgaaattagtattttctctcctctacagttttttacctgcctcctggtgatatttgctgctgaagtaaccactggagtatttgcttttataggcaagggggtagtaagtaaaattacttataatgtttttctatgatggttaaaagtgttagaatattgatacccacaatagtgttaagaaaccaaataatccccattattatagtttaaacagaactttttaacttagaagtggtgtgcagaactgagcatatatgtatatgagtgtgcaggcatatatacatgctcacatttttctggggagatagttcatctcttccattagacttatgaagtggtctataataaaaccaaaaaaaaaaggatctctaatttaagattcttccccattgtgaaatggggtaacagttagagtacagacttgagaaagaatctagattctcatcccctgtcagactgccatttgtccttaaggattggcctggatgggtccatttcattctcaaagagcagagcctacactgctgtgggctagtgaagccagtttatatttgctgcccaactctaggtgtccagaataggttatcggggggacacacagaggaagtagcctttcttcctctgtaaaacacactgtgggatagaagagaatggaatggaaaaggaggaagaatggaaacttaagtttggtgtatttcacattaactcttgtgtcattaatattatgtttctgaacttattttagactataaaacagtaaacatgtagaatagtaaatgtcacctccttttgaatttttctaaagtaactggctgtgttcataggttagtttaaattcagctacatacagaagtagaatggaatcttaggacctgttgagatatctgtggatttgaaatcacaagcttttatactagaaaaagcattctctaagctttatatgatatctgaatgtagaaagttttccttggtgatgaataccttttaaaccacgtcataaaaagatttgaatgcttttaaccaatggggtaacaggaatgtataagtccggatcctagctatgcatccaaatcatctggatggagcccaggaatctggggcccagttgatgctgaagcccagttgggcttgggaactgtcagaaatctttctagtccatgaaaactgttctggttagtctgtccttccatcctcaaaagcatcttagaaactccagaaactataatcttctccatatgttgctgaattatcctaaaatacctatggaaaggcagtatttttttttatttctacaggttttgtggggaacaggtggtgtttggttacatgagtaagttctctagtggggatttctgagattttggtgcacccatcacccgagcagtgtacactgtacccaatgtgcagtcttttatccctcacctcactcctaccctttcccctgagtccccaaagtccattgtatcattcttatgagaaaggcagtgtttttcaaaggtgtggaagaggagattttccttgatgaaaggagaatgtttgaaacttcccacccagaagtccttcatttttccttgtatttcttcaggctatccgacatgttcagaccatgtatgaagaggcttacaatgattaccttaaagacaggggaaaaggcaatgggacactcatcaccttccactcaacagtgagtaacttcacttcttccttaaaatcacagcttctaaagattatgtgtgagccaggttctcaccaatcaccaggattaaaaataaaaataaattcagtaaagccaagtagcaccacctattttagcccttttgagggccacagtttgcattatgtgtggaaccctagaagggaaagatgtctatcacacagagttcacaagagagacagaagagcatgaacccaaaagacacatgccccaaagagacaaaagagcacaaacaaggttacagagaaaggagcccagataaatagcaggctttgtcagagggtagcattgtggtgtaacagaaacaagtgtgacctgtaagtcagaaaagctaatttctagctgcagctctaccattcaacagccttgtgaccttgagcaagttacttggcctccctgatacccacgcagctccctcatttgtagaatgaagggtcacaggagatggctacactcccttctggaacattcagtgggactgtgctgtccgtggagtgctcagagctacatgcagttaatcacagaaggcttacagaggagatgggccaggccagagttattctgattttttagacactgtgatatgaagaagtagctgtgaattcctgggccaggtgttttcaggtacctagttcttgtctaggacaagtatgtcttggaaagtggccaccatttatacatttatacggtttcacctcagctgccgccaggacctgaagcagcacacaggttcttttgtcttaaagggccagctagcctaagcaggacacctgtttgctggccaatcttcaaatctggtcttttggaccctggaatttcctgcagccacttctcccctcttccccagactattcccagctaatgagtccttctgcagctcataaaacttgagctcctcagcaggttaaatgactcccagtctgaaagaaggaatctaaagccccaacccctttctaaaaagtagcaatttacacagacactgtcaattagcttcttgccttgtttgggttgccttgagtcacttcccatcataaactcagatggctttagcgaagtcattttcttgttttgccagcatgattatgtgattcttcactctccttccagaaatagcagtctgggttgcagtgactgggcctcggagctgctttgccgcctcggcaccccagtccttagcagggtgcccagacttgtagctgctactcctcccgcctggtcctgaagtctcttttctgactctctagtttcagtgctgtggaaaagaaagctccgaacaggtccaacctacatgcccaaaggagcttctaggacacaaggtaagcttctaccaaggttcttactctacctgtagtatcatgctgctagcttaggaagccattgaaggtagaatctcggatgggatctgcattttactgaatttgctctagtggcagcatagaggattgatggaaaatgaatagcgttgagctgagagacccattgggaaggctgctgtccttgttgttagcaagagatgttaaagagggccctttagaaagtgacaactacaggagtggtgaccagagaagagaggagaatccattactgggtttttggcttcaccacctacatagatgatggtgtcatttatggagctgagggagagaggaaaaggagccaattgtggagaaaagaaaatgagctttgtgtttaacatggtgattttgaggagccagtggcacttccaaatggaaatatccagtaggcagttggaaaatctggtttgtggctcaggagagaggtctgagtgtcagcacttgatgggaaacttaaagctataaatacggatttgatccattagacttggaagaaaagaaggatgaggatagatccttgggggacaatttaagggtgggcaaaagaagagatgccaaagaaggaaactgggaggggcggccagacacaagtgaggagacagcacgggaaggggagggaatggtcaccaggcccaggtgctgctgttgagggcaattcagtattgatcagctgcctaccttatgttcggcactgtggatgcaaaggagaaggagaaaaagttcctactcacaaggagcttgcattgcagtctgataggagggatgaacatgaagtccatacggtccagtgattaggaatgcatggaatgtgcaacgtgctcggaaagcacagagggaaacgcacttaggagaggcgagaggctgggggatggggaaggctgacagaggtaatgatgtctcagctaaatcttcaagaatggaaagtaattatgcaagcattgggcagaaagcgggagggggaggcctgcgtgccgagagaccagcgtaagcaacaacacagaggcagaaatgacatggtttgtgtggggaactgaaagcctaagaaggtctactaataactgctgaaaagctggcaggatttagcatgcaaggaaccaactggtgacgtgctgtgagggatggattgaggacagagcccaggtttcagagagcgagatgtgaggagagagagcatcctttcaagaagtttcgatttgagccaaggacacagaaagaaagtttacaaaagtcaaagtccaaattaccattaaacatatagaaaatatagaaaattaaaagtaatatttaaaatcaatagcaaattaaaatgaagagatgctgttgtttaatctatgaaattgaccaagtgtttttcctttcccttaacaataatacacagttttggtaaacgtgatgtcgtgagcattttcagagaaattagtaaatagttttaaaggtcagtatgactatgtaagactagaggattaagtatgtttatgcccttctatccagaaattccacttctcggagtttattctaaggaaaaggaatcagaaatgcagacagacgtttttgtgcaaatcatgctcattacatgttattcataagaacaaaacactggacagacccttaatatgtggcaataggggattgtttggataaattgtagtatattcatatgatgaaatgttttaccaccattaagaatcatgatttcacctgtaatcctagcacttagggaggcagaggcaggcagattgcctgagctcaggagtttaagaccaccctgggcaacatggtgaaatcccgtctactaaaaatacaaaaattagccaggcgtggtggcatgtgcctgtgatcccagctactcagaaagctgaggcaggagaatcacttgaacctgggaggcagaggttgcagtgagccgagatcgcgccactgcactacagcctgggtgagagagcgagactctgtctccaaaaaaaaaaataatcatcataatcatgatttcaaagaaatttttagtgaaacaaggcatttttaaagttgtaatattaagtttaaaaagctcactgttgaatataaagaatgacctaagggtgtaggtgtgtttgtgtgtgtaagtatcaccaacaaatttattaccttttatggtgagaatacagacatttctttttaaaaaaaaaaaaatctcttttccagatttctacaagaagcatgtattccttttgtgactaaagccaatataccttttgtacatttgttttttacaaaaagaagctggcaatgaagggaaggagggcctaatggcagaactagaggaggacagtctcgagtgttgttttgtttgttttgattgaagaactgagcatggtgataggataagtagaaatgtcaatggataaggagaggctgaatgtataggaaggaaaaaaagtaactggcagtgcaggcttcctgaggagctgaaagacccaaagcaggatatgaagttaactgtcttttattattatttatttatttatttattttgagacagagtctcactctgttgcccaggctggagtgtagtggcatgatctcggctcactgcaacctccacctcccaggttcaagtgatcctcctgcctcagccccgctagtagctgggattacaggtaggtgccaccatgcccggctaatttttttattttcagtagagacggggtttcaccatgttggccaggctggtctcgatctcctgaccttaggtgatccacgcatctcggcctcccaagtgctgggattacaggcttgagccaccgcgcccagccatgaggttaactttcaacagagaagggcacctctttggctctgatcagagaaaaaggagtcaggagtgtgcttgctacctacagcaatgcctggcactgaaggaagggagcatctaagtgtataggagaaggagaggaagagtgaaagaattgctataggttgactctcattttttccactaagtaagggagccactccttagaagagtagttttcaaacttttgtcagaatgcattataggtatctcttgtggatctgtgtcctctaaactgtgaattcccagaaagcaggagaaaccatatcctattgtctctgcatctaccacccctcttccagtgactaatgcaaggtagatgctcaagaaatgtttgttgaatgaatgaagtgtgataggaaatacgaagagagaagtaagggttttatatagctcagatggtatcaaaggaaccaaccagtgacaagtgaacagatctgaacaacctgagggtacagttggattgagagcatccctctacttaagagcactccaaataggagtgtttgaagttggagaaactaataatagttacaggtgatctatttggctttctgtctaagtttccccacatccatgaaggccctttgaatctatgctgcacaggtgtcttatgggcacagatgaaaggataggaactcacccagcacagcccagcccagccaccacaggagagaatggtcctctagctccaagacttggcttttctaattcttggctttcctttgtttaacttgaacctgttaagactttttagtttcttaataggtcatgcctactttgcatagtaaattgggtcaaagacatagaaagtattttaaactgtaaatgacaatatgaaaacaaagagttattgttttaagggtattttacttatttgctacaagtaagaagtggctccaaatttttagattccttggaaccagacaaatagcttcctccagttatatttcagggctccgaagaagccactggcctaaacatgaaaatctcacccaaaggagaggcttctatttttttccccaaactgcatttttgcattaagcttattaggatgatgttatcaaagatgaattgttgaaacatgagtagaagctggcatggattaactctcacagaatgaactgtagagatggaaaggataggatcaggataatgactgacacatacaatcagtttttattcccgactttttttcctcaaaacagaattgcatcgatgaaattgagaccataatcagtgttaagctccagctcattggaattgtcggtattggaattgcaggtctgacggtgagaaagttctagaacttaccctttttgccctctaaaaagccttgaaactttgcatcttatttcttttcaagtgtgatagtatcttaagagagaattctcataaagaaaaaagacctttgttcacaatgtattacatcttctaagaacaaagctcataaatatattaatagtttgtcctctaaaatataatagaaatttcaactttaactcattatgaccttgagtgtgtcattgttattaacttcccgttttaaggctactatccataacctagataaatgattttcagttctgggtctctttctactgttacaaattcaatgcaacatatcaggttaatctctctcacctacgatttgaagaggcagcagagcatagagattaatagggcgagctctggcatcacatggtttggatttaactctaggctccaccatttgcaagctctgagatcgcaggaaaatttcttaatttttctatacctcaatttcctcgtctgttaatatataaaccttataggattgccgtgaaaattaaatgggatactacatatacagtagtattacaaattaatataaataaagtgtctgggacatataacactcaacaaatgccagctctctgcataatctaccaggcaaaggcaatggcatagatggtattaagcgtagtgcatccagaccaccaccaggtggctctgtacttctaaagtacaaaagaagagtgtgtgggaagaatggatagcagcggacaggtatggcaggagttgcgagaggtggtaatggagagagtattcgatctacatcattgagatctttgtatgcccctttgaaagggtgggcttcacccttaaggaaaggggagtcaccaagagttggaagaacctgtggtagaggatagaggaaaggttggagggaggcaagattggatttggaaggcgggttaaaggatgatttccattgtccaggggttggatgataatagctaatgctaagatggcacttagtctctagccctctatgtagattaattcatggcctaaactaaggcaagggctgtgggaattgtgaggaaatcagtgaatttgcagttatcaggggacacacaagcgccttccccttttctgtatttagagcacagaggggtggagaagtggctggaaatactctgctgaggccctccaaatcaagggacatttctcaggtcctccccacctgctctggggatagcctggctgcagttctgcagctccccaaaggacagtcctgaggcaggtctgagcgtgtgctgcataatggagagtttcacaatctcagcaaatgagcagcctagaagcattcacccctgactcgtgtcggcagtaggctgagactgaaggagtctcactgaaaccaggatgggtagggattacatccaaccttatggcaatgataaaggggaaatgcccatagtgagcctatcttgagtcggcacccccaggtttcttcgttagttcttttctctgtaaagtgagagttgcacaatgtaatcagctaactaaaagtgcattgggtgtcgcccgtgctacacactggtactgagtcctgtcatccagaagcttgaaatcctgttcctggccatgcccttacctgcttctgcccctcccttttcaaaacaactgatcattcatatcttattgaatttagcacttacagatcctagtctgacttaggatggaattgaggagagaaccagaaagttatagtacccattttttaaaataagcattgacagtagtttatggaatggtgcccacagatagggttccatgggctctacaaaattgtaggggaaataatagcggacaagaagactctttggcattcttctattcaaaccatggaagtggatattgatttcactcaagtatttaacttctcagagaactatccaaaaggtaaaagtcaataataccatagtataaaccctttagtttatgttttgctaaaactattgaattaaacagtgaagcatcgtttgcccttaaaaatggactgagaatgaagtgatgctccactttttttttctttttttgtgagacagggtctctgtcaccagggagtgaagtggtgcaatcacagctcactgcagcctcgacctcctgggctcaataatcctcccgcctcagcttgccaagcacctgggactgcagggacacaccaccatgctcagctaatttttgtattttttgtagtgacagggtttcaccatgtttcccaggctggtctagaactcctgagctcaagcgatcctcccaccacagcctcccaaagtgctgggattgcaggcatgagccactgcacccagctgatactccatttttggatgtatggacactgttgtaaaaaatcagagcttttccagcaatagaaaattatttagaccacaagcatatctaaacaacaagtggttatggacacagttttcaaaataaacatataaaagagatctaggattaacctgaaatataaaattccaaagccagtattgtgtctgtctttcacaggtattcagaacggttctataattctgaagcagggtaggttcttttaaagcagagccttgttacttgttaacaataataatacacatttaaacagttaatctagaattatttaccccatagccaaccttaagtaacatactaaaatgtcatttgtgactggtaattattggttataattatttgttaacttgagttagacacccaggaagtctgctgaactttttacctatcagtacccgtttcaaagtcactgatgagtgtttcttctgtttcagatctttggcatgatattcagcatggtcctctgctgtgcgatacgaaactcacgagatgtgatatgaagctacttctacatgaaaattgcaatctaaagctttcataccaaatgtcacaggagctgtctcccagctcatttttaacactgaaatgacattaggatctaaaataatttgctgtcaattgtacatttgcatgagtacgtatgtttggctcattactggtttaccccttgagtgaatgcctgtttatgatgactgagagcatattcatgtgtgatctgcgtgtttctggaatatgctttatacgtaatgaaatctgtttgctgggaattcctgattcttgttatataagaagaacaacctatttcgctcccagaaaaaaaagatcaaagagctttcagaaactttgagaacttggctatttagaaaaagtgataatgggtcagtttctcagactgtagccattgaaaattagatgcagagaattcagagatttcttcttaatggaagtaataagctgtaagaattgagagatcacaatggagtgttaaaactgactgtgtctaagttgggtgtaagggtttcctgggtttttttatatacatgctctccccagaatacagtaaaccacagttttagaactaaacacatctgtaaaactaaatatagcatggaaaatccaatttgaataagtcatgctttcctagaatttaaaaataaaaaagtcttcctctggaaagagaagtcacacagacaatcatgtgccctataaaagtgagtgtttataggactaaaaaacttttaacaactttttaaggaaatatttttgttcttatacaaaaacatgtaaatattgctttattactttcattttctgaccctgctgtaaactactgcaaccctcacatcctcaaagggacttttatgtcaaactcttctgtttctccaaatataaggaaaaaagactaaagcaagagatctggcagttgaaaattgtgggaaagagaatttgtatgggcactgtatctatgaaatacctcataacttacgtttacatgttttcctaactttttgtatttttcttgtatagccacctagagaattcttcatagattaagaactacagttttcaccacttaacataagtaaaacaaagtccttcataatttaaccattagcatctttggccaaaccaaaataaagaaaagcatcttctcctagttgtgtgtgggcaacagaaacaagttaaggaaacaaaaatacttatatatacacagaacaaaaataatgttctttttatgcaaatcccctgtgaaaataaaattttcaatgtttttttggtcttaacgcttcattttaacttagtaaacccaaatttaggatttacattggcaaatttttcagtgatttttaacgtgttacatttagtaaaccatagattttttaaaaactacattttgtaaggccacacataagtgaaaatacggaaggctttggaaacccccagatgaacttctatacatgtgaaaacacaagtctttgagtgtgcactaaaagtgtcacactcccaaaaaactcacaaaacattttgctaaaaagatatgactgcttgaaatagtctctctcccatggagaaccacatttctctttctgccatacttgctactgctactgattttggaggaaatttttctagaagaacaaaggtcatatttgaggcaagctaaaaacttaattatacatggctactttactgtgtctgtagctaaagaaaaattattttacaaaaattacttcatgaaatatagtttgtaccccagtagttgagaaatgtgaccttttaggcaaagaacaggcagtccatctctcttagctttagtttatctctctgcctgaagacaggaaacaggcccaagtgcatactcgggttctttccaactcagaatcatctctgattccacaaaagtgagtttagtttcctatctgaattaacaactttaaaggagactataatagttaaaagtggaagaatagaaataaataaatttaaaatgaaattaattaaagtagaagagaagggttctgttccatgtacgattaatgtgccccttttggagataagctttccaaaatatgcgtatgagtaaaattagagaattccaccactaagcaacaatagattttatatgtgtgtgtggatatatatacacacacacacagaaagatgaatatatatatatatatatctgtatagacacacatataatatatatagatatataatccctatatatcttgaatctacaaatatctttatatgtatataatttgaatatatacatgtatgtatatacagatgtgtgtgtatatatatatatacatacacatatacataaattttcagctatttctgttcccctgaactaatttgagattagacccaaacatgcttttaaatgtctcatgccaaggcactgaattaagacttcttaatgttgaaatattttaagtgatttcatattaaattttctatatactgaaa

SEQ ID NO: 178 - DNA, 212096 bp, Homo sapiens
gcctttggctacatcggacccagatgactgcctcctcacttcctccctcccgattccgccgcggcccccaaagactctcggggtggccccttgtccgcaccgcttggagggagtgtgctctgagttaagctggtctcttctggtcctggaaaaaaatgagtattgacaaggttgctggatctgcgcagaaaagaaagtgccacttaataaaaaatttagcccggcagtggtaccgtctgcagagcttgctgcccttggacgttagcaggaagccttcggggtgctgtaatcggcgggcagaggagagggaggccgcggaattaaaaggaacaaaagctagagcgccatgccaaacgtccccggcaagacccagttaggcaggagccgggagtgatgggaaaatgaactagaagtaagtttttttttttttttaaatgaaaagatctgaggcggtaccgtactttccctgtggttttctgcagttttcctctctgcgctctccctgtcctcttctctctccccctctccctctctccctgttcgcgcgcgcgcgcgcgcaacacacacgcgcgcacgcacacacatacacacacactcacacacacagacacactctccttttcctcccccccgccgtcccccatccccgtggaggagcaggcttgctgatttgctcgggtccgcccggctcgagcctcccctccccctcccgcccccccgcctcccccacccccccagccggggctgtccgatcgcactcgttgcatatcagaggctcggcgcggcgcgctcctcctcgctcccgctccccactcccgggatgtgtctccgccgtacgacgggctatggccaccacgacttccgggttccgtcatttcgttctcccgccgccgacccgcgccgccaaactgaggctcttcaataagccaggcagcagccaacctgccaacacctactgacactcactcatctcccagagagagaaagagagcgagagagagcgagcgcgagagagcgagcgcgagtgagagcgagcgagcgagcgagaaagagagagagggagagacaaaatacctaccaggaaagggggggaggaagtccaatttttgcaaactattcatttttttttcttgatttttctcactgctttctttgaacaatactttaaagagagaggatcgtattatagataccgcgggggcaaagctaaaaaaggggggaggggggaggaaaaaattcaagaagcagaaacccctcgcggagttttactggaagaaaaaaacgggtctgaaagattcctcctcttcatcatcatcaaccatcattcattcactaccttgacattccgggctttgattgacagctggagtggcaaaaagccatgaaacacgacagttcggttacatgtgggctgctgacgggccgctcgtaaccttcagttcgggggcttgacaatttttttcttctttttcttctttttcttttctttctttttttttccaactgaggggaagagaagagaaagagggggaaaggaggaccgaagaggaggaggaggggaggggggaggaggaggaggtggaggaggaggaggaagatcaggaggaggaggaagaagaggaaaaaagagaaaaagaagaaatatcacagaaaaaaaaattcttcgttgtctagactgggctttttttcccccctaaaaaatagcatattggagaattgggagaagtctctttggtttggaaaaaaaaaaaaggaatcttcagcctagatcactttcttatccggactgggatattaaatatacgacacatccaggagtttattggagcgcagactgatggcgcaaagggtaggtttaaatctccaacacttacctagatataaatcctctcctaagaggggcctgtcccgatgcctcctctcccttcaacgcttctgctgctgctcgctgcttgatgatggcggccagtattttaaaaaatagcaaaattattcatcggcttctttccctcccgtgcctctgcgtgtgtgcgagtgtgtgtgcgtgcgtgtgtgcgtgtctgggcgcgcgtgttccagcgctgtgcgagcgggcgggcggcgagtgcgtgtgagtggtgtgtgtgtgtgcgtgtgcaatcgttacacgctttcgcctcgctccagcttttaccccagcagcgcgattcccccggttctcctgctgccgctgctgcgccgctgccgccgtggctcgcgcggctcggggcgggcacgggctgcgtaggagccgccgccggggccgccgctggggccgcgctgccgcagccgctgcgccgccgcctagactactagcctgggctgcttgttttgtctctgaaattgacaaggacgcagggaatccgctgctaaataatgtttctggtaactttcacgttattcgcccccccaccctccgctccctgcccccggggaggcactggccctagtctttcctagtcctcggcgttctcgtgctgattattagcgtttttcttctctttattttgtttcatttcgccttttgatttattggatcctcagaggaggcgaaggggggttaggggtgggatccggggcttcctcctcacactaactccacttctccctccgttggctcgctacggttctgttgcctccggcgggagcggggcctcccggcgccccctcaaatccccggcctcgccgcctcctcttccttctctaaacgttgctcttggttcatgctttttcatttttaaatttaataacattttttcctcacaacttttaactccgttgttttggctggtttggtttctgtgtgctcaacttgtgctcggtacttttctcctttctgactttgtttttatttttattttctctctctctctctctctctctctctctctctctctctctctctccccctctcctccttttcctcctcctcctctcttctctcttacctccctccctctctctcatctttatcccttcctctcttttctgttcgccctcttctccctgctctttttccctttccacccccctcctctgttctccctcacctcctgcgccccctcccccttcccgggttctgacagtacgatgagctgccccattacggcgggatggacggagtaggggttcccgcttccatgtacggagaccctcacgcgccgcggccgatccccccggttcaccacctgaaccacgggccgccgctccacgccacacagcactacggcgcgcacgccccgcaccccaatgtcatgccggccagtatgggatccgctgtcaacgacgccttgaagcgggacaaggacgcgatctatgggtaaactgaccccccggacccagcttactgtgtgtgagtgtgagagtgtgtgtttgtctctgtgggggtgggaaggtggacgactaagtggggagttacttctgtatggtggggggcgggcgccgcttgccttaggaagggaccgtggagggggcctgctcttctgcccctggagtcaaagccccgaagaactagcctctttcgctctcacagcccgaccactccagaccccacagcctggagtgactgagtccccagaatcttgccggggccttctccccgaggacaggattcctggccaaaggacgcaggactgctcgtttcaggctccctaacagaggccttgacgaaggagaaagtttcctgccgatgagaagcaactttgggtttttttattttttacttttttttcttctgtttcctactgagggtctgggagtcactaacagcagcttgagctgggatcagggctgcttctgtcggccaggaagtcctaatcacccacttcttaattctctgtaaataaagggggcagacctcgaagtgcagcgaggtggaagggactcttgcttgcttggagccgctcttagggggagtaaggaagatggctggaaattattttatattctgagagcacttggcgaggggtgagatgcacgatcctaacgtgtaccacacgagctcttccggctgagggtaggtgggcaaagcgacgggatgccgaggggaggggacagtgggtaaacagcaactgagccccaagccagaggccgcaagcatcccgaagtgtggctaagccgcccggaggaacacaaagggcatacgcgcacgcacacttaaagttttaaaacacgatttatttatttttgtctgctgcaacgctgggagaaatgtggtctttggaaggaagctctccagtgtgtaaccttcctattattttggcccccacactgtggctttagtagaacaggagcaaacaagtttataaggcaaggaggtggagagattaaaagagcattctcttgcatttatgaagtgtcactccggtgtgtatgtaggtgaagcctttggcctcgtctgaaatgcccattaaaatgcagagttaaaactatttttttttcaatttcacacagtgttcccttcttgggaggtcagggctgggtctcaggggttggttccgcggcctccgtagtgtggggagtggatcagaatcgactcgggctccagactgcctgagcgtctcggatgtttcattacgttccaactgaggctgtttttatttgtcgggctgcagtggccggggtcttctctggccagatctgagggacctctgagctgcgggagagggccaggcccttttccctttctgtttctggcttaggctcgcctgatggaggaagggttgtaaagtgtggtgcgtgcctgttgtattaaagaaggactccacaccctccaaacttgttgattacagttcttgctccttcccctctgcaccccgtctctgtgtgtgtgtctctgcgtggcgctgcccgttaggcacccgttgtttcctctgttagctctggtctttgagaagtgcgagctggcgacctgcactccccgggaacctggagtggctggcggagacgtctgctcctccgactccttcaacgaggacatcgcggtcttcgccaagcaggtccagccttcttgatccactcaacttcgggcagtccctcactacccctcccctttcctcggagctttacttgaaaggaggaaaggccagggacaccctatctgttcctctggcccagtccgctctctacgcctcctccccatccctgagcctgggggcgaattggaagtggagataaatatgggtgtttgttttcccccccagcaggaatacaggggtcgaccctcgaattaaagttgacctgctcctaatctggggcttggcctttttcccccgcctccagctacttgaacaagaattggggagaggggctgtgagggacccgggagtgcccgggaggcaaggaagctgggcgcctctccgagcggtcccaggcagcagtggagagccacagcctcttggactgctggatatggaactcgaggccctgagaacgaccctgagttcctggctacagcttagtcgtaccaggtcccccttaatggggccaggaccagaatgccctgattcttcttcagggactccactaatttaaggcaccagtttctttcttgtattttgccaaagcccctttcctcttctccgccattgccctccaccgtacccattctcacatttcagctttcttattttaaatggggtgatcgttcaagttgactctctgtttcttacaggttcgcgccgaaaagccacttttttcctcaaatccagagctggacaatttggtaaggctctctgttccttgtttttccccagcctttgccctctcccatgcccagaagcacccactttctgctggagctctggggagttagaacagaaccctcttttggagctctagggagagagggaggaagggagcagcttagagcccccgcacgggagctggcgagcgaggagcaggatgaacgcggtggggagcgaagcccagggaggccgaaacgggagaccgagcgccgagagcgcgagcaggggatgtttcccaggtctcggccccaggagtaaactgcgagaagtgagttatttcctctgtttgccggggcaggcggccgagccccgggcggctaacccgaaggatgtaaccactggcacggctgagggcgggctgggggtgggggctggggggcggtgaggggcaggccagcgcaggccacttttaggtgcgattcttttgctaatttgcacgatttcaatattaaaagtacttaaatccgctttcaaaggccctgcctcagcattcatcttgagtatttccttctttagtgaggaaggatttcgctgggtatgctgttctaaaaagctttttctatcctgagaagggaccttttttttttttttttttttttaaggaaaaaaaaaaaagttgtcctgaggtcgagggaggggatgtttaaagaggactaagaggagaaaaaaggcctggcccgaggaaagcagtcttacaaatagcacagtgaacatcagggggaaagatattaatgcttatgctcaggttgagtcagattcctaccccgtggccaatgaggcagagatgatcagtaatcacttgatttttctgactatttcttgatgtttaagtttttcctggccacctgcccgtttcttctccccagcccaactttctcaccaccatcctcaccccactcccaaccccaagacaggacctcagagtcacagagctctaactccattccctgaacttttctttcagatgatacaagcaatacaagtactaaggtttcatcttttggagttagaaaaggtaagcaggaaataacgctccccgtgttgattaaaccatttccctctcctagttgagttgggatgtttttaacaaacctctagtgtgagggattgagcacctggagattttgagcatgtaaccatgtccatccttcaactcgcttctcaacacaggggctcagagggtgggtgaatcaggacagccttgcctttaaagtagcctcctcctccccaatattcccctcaggcattcaggattattttgaaatgcagcaaaccatttatgttactggacactcagcctgcttgcatctttattagctcagctcaccctcggccctgggtttgcattaggtgcaggcagagtgaatcatccttgctgggtgtctttacattgctctgcagctcaattactttcccctggaaacatacgaaacccctagcttataaaatcacaaacgttaatgctctccccagctccaatgttgtaatgttttgatgttattatcaaatcagatttaattccctggactcccactctgaacccagttatttccagtcctgtttctttctctctctattgtaacttgttgctcagagaagtctctggagaataatatctgctgcaacaattactctattgtttccttgccttcaactattacaccctttaattagagttagtttggaagacatcacactgttgctctttgcaaatgtaaccttgcaacctggtatttttcctttctaaaaatgaaacaaaacaacaacaacaacaacatgagctaaaccctccaccatgaccttcgttctaggtccacgaactgtgcgataacttctgccaccgatacattagctgtttgaaggggaaaatgcccatcgacctcgtcattgatgaaagagacggcagctccaagtcagatcatgaagaactttcaggctcctccacaaatctcgctgaccatgtaagtctgctagcctttagcaatcttttaaggccactgggcaaagcattattttaaccttgttttaacatctagctccactgatttagttttctttttaaatgactccgtctcttttggggtcttttcttctctttcttgctttctctgccatacccttcattttcatttctcctttcttggaccccctcctatttatgttgagagccaaaaaaccagagttgatagagtgatttgtgctcttaatgtgtaaagttttctggatttggtgacttgggtgttcgcaaattctgtttgatatagtcaccactgtgttttctgctttcttaattttgtgtaatcagtgcagcagggatagaaagaagcaagacagttagctggactggtctggagagagaggactgaatgaaagagaattgagtgagtgctgatttcctagtatgtcacagagatgacaattctgagaattattggcaatcttgcactgcattcgaaataaaaggggtgaacaaacacattacaattctcagggcttttgctatagaaacttattgtcagaatagggacttattgccaaatgcctgaagcatcttcataataaaagacagtaaccttgatgaaccaattattaacaatgtattacagaaagctgaagggaattatgattgagtaaccataggttagtggttgaattttaacactttaacagttggtgaatgaggatggagagtatagtaagaaatgactgtgtatgtcaggccaggaaaggagatttctttctattctctctgtttctaatcctattttggaaccaatctagtgagtctgatgctaaaaaaaaaaaaaaaaaaaaaaaaaaaaaaaaaaaaaaaaaaaaaaaaaaagcatatgtagtgagactgaaaatttgaaaaagaagcaaagagaagaaagattgcagctggtaggaaaggcaagagtggcgaggttaaagagtgggtgtgaacagcagttttatttataggaactcaagcctggaaatgggggacagggtgtctatagattacattcagttgaactcacagcctaaataatataagctgtagtttaataactttgtggccgaaatattaatttgacactccgtgtgagttaaacaggcattaaggcttgaaggcagtttgtccctacctcccatcccaattcctgactggtatgagaaatgaattgggatgccttagtataaaccttctatgaggttcttctctcccctgctccagacaaaagttttgaaaatatgcagtcatagattttcataattaacctttgcacttgtatgggaagccagcctaagaacaaaagttagaaaaagtctagaaaagaaaaccgcagtctgggatatccagttctgtgacagaataaatactgcggtgttgaaggctcctattcttatctctttacccttacctttttccatcatggtgagggaatctttggtgatctcctttgtatattgagtgaatgtaatgaaatcaaaaggatgcagcagtggttatggaaagtttatttgctgatctgtggctccacagtgtgttgtggtccatgaggcatgacactacctaagaaatatttacatttgttgttttttgtgtgtttattttcattgttttctgtttctatatttatatttattcacattattgggagactggggagggatctatttacatggtttgtaaaatgagaggttcacagttctcggagccaaaagcttttctcatgatatttctaggagtacctactacttagttttctaaaacagtttcttggcaactctttttccagtggatgtatacagctagaccatgttgatgtttacatagaaaagataagataaaataggctgtttaaagtattggctgatagacaatatcaatttatgagactattgtaatatttaaatatccactcaagaaggaagttgtacctaagaggatagtgctttaataatttatcaatcatcatctttggataaaagagtcaactgtaacatttgttgctctcctttcaggcccccagtcaagtaaatatgacaactgatttattttgaacccatgagggcttgccacttcattgggtgtcataatttaaagccttttatttcctagagatctgaactataacatttttactttagccccctgctatttgttttgaaaggaagcaataatttgttccaccagcacaccaagtagaaaacggagagatttgccacagacttgtattttatgcagggacatgagagaaaaccttggagagttttcaccatttttgagacttttgtaccataggtgtattgattgtattcatgtccaggcttcccccttcaaagcaaatcctcttatgcttttcagcctcttctacaaagttgccttccttcaaccccctagccaaacacaaagtaaaaataacaaagaaccactacctgaaaagtggtgtgagtgggacattttcagcatgtaaatgtgcccaatttgaatcttcaggtttatttttcatttgctttgatatgcatatttaatacattgccccaggctggatctcatttggtgaacactggtgcaggggtgatgatgagccacttcagaaaggcccagacagcgcgttgttttcttgttttatctgttggcccactattctgatctgagcttcctcttggttttatttgcacatgaaatgctgagagcatttcaacttattggctatgaataatgacagctaaaaaagaagtgtagtttaatttgttgtatgccaaggtttctcttgtggaggtgacagtttgtgacagctgtttgacacccccaaaacacatacacctctactcttattaagtggtatccagcttcattgtgtgtgtgtgtgcatactcgtgtgtgtgcatgtttaaggaaggaacatgcaaggagagagagaaaagcagagagaaatgcatcagaagcaaaatattaggtaccaatatagtttcagtattctttaaaagaatttgaaaatgtaaataaataaaagtaataaatataaatatcttcaaagcaagtatattggcagacttaagaataagttttatatattattagtaaatcctgttcacatttcataaagttatataaataatttgatataacagatgcattagaagaagacaaccataatattcttgctttccattccttacattcagtgaggttactgagtttattcatttattattaacacttacatatgatgggtgtaatggaaagaggaagtttggaattaaatagaaaataaaataagcaatattgattacaatttcgttgtatttagtaaatttataatgcatgcttatgtttttaatattataatgtattttgtcttttactataacataataataatatttataggtaggaaagagctattacaatatttttggaatattggggagaaaaaaatatataatagtcgaaggaaatagaactctgttttccagctgcagttcatgttagtttcctagacattcaaatttatcatgtttaaaataaatatgtctaaaaaacaatttttaaagaagtttcaacttgaaaactgctgtgaaatgaccagctttttctagcatgtggagttcctgaataacaggtgatactcacattatctattttacacaattttagatcagatatttagacctagtacagacaaagaaaatacatcctcacatttacatgtaaagatattacatgtaaagatattacatgtaaagttcagacaaatgaaatctacttgcttgaagtatattctctgagctaagctctattttcttgaagcaaatacagttatacaattatattgttattcctagttagtggtcataaagagctacatttttattttatttgaaagaattcagtagaggaaagaaaatacaattatgtctgttaacagttaatagcagataccttaaaattgcctggatctactaacaccactaagaaaagaaaacttattgtatatttatatgttgaaagctgtaatttaaatgaagatattctggtgttttcttttgcatctctgaatatatcaagtttatgttgacacagtttgtttgtttgtttgttttttcaaatgggttaggtcagagaggagactctccagaatcttatttctgatagaatatgggcaagtgactctagataaattcaattactacctgaaaaattagagggaagtgacagtgaggggtgggataggttcaagtggttgttctatagaatatcaagggggaaataatgaaattggataataatatgaatgctttattttatttgctagtttcttatgttttagtgtaaggtgagaccttatggtatgctattcaaagcctctggggcctattccgataaagttctacttctgagctctgtccaccaactcaaggaagcatggctgggtgcgtggattttctgttgtgttgctgctgcgtggtttctggtggttgttagctttcttaattccccattaagaataattatactatttaaatcatttagactgtgcagttggagtatgttttcagtgtaactgtgatgagatgaaattaaacaaaggttgtaattgacaaccacatagacattccctatcagattttttgaaaattggcattctttaattcattttctttttttaatactaaatgttctatggaatatcccaacacaattcaaagttttaagaggcattttataatatggcattacaccaacaatacaagacatttctgtcttctctaaaagttgctcgactaaatggagaaatcatttgcaaagggtgcttgccacttctgtgagagttgcttacatattaatcccaaagcttaatagagaggtagaagtggggaggtgagggaaggaccccagctttatttacatttttaaagagtgagtccaggttctgaaagcacacataggtctcctgacttcttatgtcaactttacaacaccggagttgaaattccaacatttgttcaaaccacacaattaacatttttaacttttgtagacttcagtaccccaagataggagtccttgttttatttttaaaaatattttttgcataatgttaattaggagttaaaacattataaagttatgggaaataagtaatttaattatgtatgttgatacaagtatatcttccctttgttgtttaaatatattgagtcaaattagttgtacatgcttcatttactgattaaaatatctttatgtatgtttactattactctctacctatgagcacataccctgagttactttattctattttccaagtttacatgtaatttttctcttgatgttatatagttgtgtaggttctagaagttatctggtctaacttcttaattttaaagagataaaggaaatgagccccatagaaatgaggtacatcacttgcttaagttcacctgactggtgagaggtggcatgccagcatcttaattccaatctaatgttttctttcctataccatgtccactgcattgccttttcatttgggatctaaaatgagtttcagattattttagatagaacttgtatgtggcatggcctttgcttttctccttgaagcctcatacattttacttctccattcagttttgtatttatttacaaacactttatacatttcaccccactggccccatggaagaaccatgtgccatgtggaatcatttaaatagggaaataacaccaattcaccgagacttattaagtattctcttataggtaggtccctcatggaaatgccataatggtttaaaatgttacaattccagtgtatctgcaacttcaacaagagaggcacacatatgatttgcttcctatgcccagagactcctgtcctctctatgctcttttctagatttagcaaaattcaatgatagtgctaaatcaatttttttttttaactttcaagggagaaaacactggcacaattgtgttttctagggaaagctgtgtgtaaatgagaaacagagtagagcagcagagcgctctcctgtggccccactactacaagctctgcccatattgtctcctgcttttatattaattacaacttgcattatcagctgtgagtctgtagcccagcaaatagaaaatactgcccctagagacctagcttcttgtatctattttccatctccttctattgtgctccactcagtattcactgcttttctcctggtaacactgctctgtaacacaattacgtaagagcaagaagagtaccatatttgactcccaattaccaaagccactgggaatagaaacatgttcactccttgccctcgggtgtcttcatgatttttttggctggagaacaggacatatattgtggcatgcatatacctgaatgctcagtcatacacgggcacccggcgagcgtttctctttatttttctacttgcatcatgtgtttttacatgcttttgtatgtcactttggtttcaggattcactaaacttctgcatataatttggcagaaagccatgccatttttcttgaaggatggaaacttgtaaactctaaggggaagaatagaagaaaggagttgtgatataaacaaatattttaatctcagggaaaacaaattgttaaaagtaataggttttgtccatccatgtcagtgacagttttttatgaccaaggaggaacaattttttgttgaccagattatcaacatttgtatttgtatatgatcacatcaccaccttgtgtagctcaatacaaacaacttgtggtaactcctcagccttgaaaccccagagggatttatctgttcttccttctttcaaatcagatgactatcgtgtgatagtccttagttggtgttcagtctctcaaacaagaccataatacttgagacactctatgggaaataaacatgacactttttcaggagagcatttttaaagagtgagaaagaaaagagggaagagataagggaatggtaggttaaagagtgaacttaagcatattttgggaatgggcagaaaaccaaagacccaatttatttggaagaaccagctgctcttaaaagtaatatttgcttctgtggcttatttttcacccctttactttagaaaacatctccttcagataccattgaaagaaatacactgaattataaacgaatgaggcctaacttgaaaactcagcaccagtttagctgatagggacaaaccagtgttttcagttacaggaagtccttctgagtgatcccttcaaatcaatgcagcacctaaacagaaagacttgctccggcttcatataaacgattatataatagctattggatgacatttgccttaaaacatagttgaggtgttagtggttaattattataattttcatgaggggtaaggagcttttatagcagccagcttaataaaaagcctgcagtgcataaaattaacatcattgctgtgtacaatgaaaagtttagcttaggtgaatatgttgcagctattgcattttctaaaagaagcctctagcctgtgttgtcgcaggactaaactcacaccatgctattgcttctttttcttttctttctttttttttccatgtaattcttctagctctttatctcattaccgcccggcaaacagctgacacgaagaggcttcaaagcttgaggagcccctgtattctgtttgccttttgcttgaaactattggagtggtttctaacttagattaaaaagagagctcacaggcatgactttgtctttctacaggcagcagaaaaccttgacttttattttattctactcaatttcattccctaatctactttctcaaacatatccttattttagagatctatacctgtgccatatttgtagtcacaaaatttctgctcagggttttcactttgaatcaattgcttgcctgatagcagtgccagtatcattattttatatagatgttattaatccatagagctctggattattatttcataatctatcaaaaatgccaaatattaattcacagtcagtttgctgcagatctgtagggggaaaaataagttttgtagttccaaataagaacatttccctatttttttctcaccttggtttcttgttttattttggtaacatcatccatgctatatgtacactgtagagttgatgctgagaaaaatgacagactgacttcttttcttgatgaactatacataatggcaacatggcaagattactttcccttggtcaagaggtttatttgttgcctatacccacgtggctctgtctgaattcttatttaccaattctagtaagaaacagtgtatactttgattggtttttttagtgatatactttgtatattttgattggtttttttagtgatatactttgtatactttgattggtgtataatttgtatacttcgattggtgtatactttgtaaaatttgtatactttgattggtgtataccttgtatacttcagtatatacttagattggtatatactttgtatactttgattggttttgaggaactattttgccccttcctctggcccccaaatcattcacttgccagtaggtctgtgggcttaattgaagtcgtcatatgcaggtgacaagtgtacagctctggctttaaggctggactgtttcgtatgctgttcctcctctccgtttctgccagaggaaattccatctcttgcctgccttcatgtggtgctgataaagtccttcctgtacattagaattcctgttttcctttaagcaacagcagggcattgggaatgatcaggaaaagggaggaggaacagaagaagaatatactcagccaagtagcatgagctataactcttggtttgccttgcatgtcctttgaaacaagtagttcttctaggaaaaagcactgctcagtgaatttcaagcttccatgaagctcaagtgaaactcctctctagcttactagatggacagtagttcacacatgtttcctttttttaaattatttctacaaattaaagcaaaaatcaataatttattaggtattgatacagtgattaatatcattacctttgttggttatatagtcaatcagttgataattttgagagtttgtataggttgttttagggcaatgcatttgaaagatgtcaagggctgtcccatacattgtggagcctgtaatttttttaatggagtcattgaattttgcagatgtgaatgttctgaagtattgagtgtccaagagcatcgggacctatttcttagtagaatgtaccctaattaagatagcgagagtaaaaatgacttttacatttttcataatttttttttactttagaaattaactttgtttaggtttaaatttgtatataataaaatttacccatttaaagtatacacttaaattagttttaaccaacatatacactggtgtaaccatcaccacatcaagttctagaacatcttttcttttatatacctattactaaaaagacagcacaccataacatggcatgcgtatatgcctactgccacaaatactaatatgtatacatttttttgtctctttctgtgccgttccttttggttcttcattgatggctgaaatggtaactgtggaaaaattccttggtatcctgacatcagaacccttcttcttggcgagaccacgatgatgcaacctcaacccactcagcaggcaccccagggccctccagtgggggccatgcttcccagagcggagacaacagcagtgagcaaggtaaaaggtcaaacattttcctcgtgcaaagtaggcatgactaaaataacttcagtattttatgatatcagtacatctgccgccatgtaaacaggagagtggcaggttagggagtagaatcagctgctatttaaagagacagtatttcctcttcttaacttactttccttaaaaaaagaaatcaaagtgagctgtctaatctttaagtaggcattacaataacaattgattagttctgccaattcttttacaaatttggttatctacactttatttctgtgtgtataagtggaatcacaggcctgctttactgctgtgatgcagtagcttgaattgtgctataaatagcatattttgcctgtaatatcaactataagcattctctataatcaagcaattatgcctctaaagcacataaaatttaaaaatctgttcttattagctctggaaatattgtggaattttacatggaatcttatcttgggaaggtagattttgaaattcttagaggattatttgtccccatttccattcagctgacatggtgacttttgtcacaagtcctaaaaattagaataatcagagggcaagggggacatcaactgcagatgttgaggaagcctagtgcaatttagaataaattttactatttaaaactcacctattgcacagagagcaattatatattggtaggaatgactcatctatggctaaaatgataatttaaaggaagatgcattattgaatgtgggccagggaagtgtatagattttactttttaatattttacattagatggtgtctgatctcctaggtctatttcatctctattatgactgtgtttatggccacgatatttaagtcttagacaggcttccaagtagaggacagtttaacagctcgagctgtagttatatatgccatttaaaagagggtgttgatgtaagtagggtgccttttgtcctccaagcttctgactaggaattttggatttctgaggttctagaagagtctagaaaaatgtcctttctaggatgccattcatttgtgaatgggtccaaattagaatctaggtttaagcaaattgaaactaacacagcgatgaatcatatcagacggcaaattatggaagaacttgcaacttgcacctatataatatatactgttttatatactgttttattttaccagttagtttctatataaaagataagtaaattataaggcattttcaaggtaactggtacatagggtcaatggatctgcaagcaatgacttaactgtggttccatgtcacagtgatggacttctcagcatggttaaatctggaaagctttctatgactccatccttcccaccaccccaaattgcggcgacacaaagggtgaaatgtatctattaataaaaacaaaatactctaaacattgtataaaagaggggaaaaggagaagccgacttaatggtctaatgaggctatcttccagagacttcttgtgtgtgaggctcactttgacctttcgctttgctcaggagcccagcgcctcatttttcacattcttgcaattacgttaacgcttcaagcatttctgactccaagtcagctagcaacaccaggcataactcaacactgtgagtttttctcctctctgtagattcattaacaggtcaccaaggtcccaactgaaatttaaaactgactggttctgttgggttagttgagttatggcaagggagatagcaagaaagggccagagagaagaggaggtgggagaaagaagaacccaggttttggagtggggattacttgtaataacgagcaaagcataaagttttagcgtttcggttagttagttttgttttttaggaaagagaagaattctgagactgatatataggtaaaaacaatcacacaaacttctgtgctgtgggtagatgcacccacttatccaatgctgaaggatttgatccctgtaggattctgttcctttaatcatgtctctgcgggattaaagaatggacatggtagcttatgtgtatgagtactaggaagtcagtcattttactgtatcgaagtttgaaagaaaaaaaaggtatgatttctataaaatggggactattttggcatagaaaatttcctacctggcttaccacatcagtgattaaaacacatatataagagcattctggctttttacagcagactttaaaatttgaaggccagacttgagtgtatgttgtcatactcatgcctatattagtcttttaaacagggtttcaaggtattttgatattttgtcccaccgaattgtccagagtagtttcagtgggaaagattaattatctgcttcagggcaaagtcaacagagatattgactgaaatcgcatatgcttatcctaggttaaatcttagggttgatgtataatggaaaacgtgggagagaaatttatgtccttagtattaaatatattataatgtttcattggaaatcaagtttgtagtttcgcaaagagttttcgcattcagaatttattagcaaaacaggcatatggaaaactgtaaaatgattcagtttcaaaacaaattatgataaacacaaaaaatagggatgaattgtactaaatacaatgttttcatacacattttaaattaaactttaatagccacatgctataaaacaatacatgtatttatgttgctttataatttttgtgattatgtttactataatgattcatagaaactttactttggaacctaaaaataccttgttttatgacctgatagtgaaacagctacagttacacaggtgaaagttcatcttttcctccatagtgtttcagcaatgaaccaaaaggaggagaaaaaatgtatatcacatttttaaaatatcttaagaaataaacttggtaaaatgtgaaacctgactttactatctttcaaagagcacatgtctaacagtaagctatataaatatgaaccagacttttcattcactgatttctcttgctaaaagcagccaaaggaagggagtttgtcttgttagtcacattagacggaggaagaaaatctggtttttcaaggatggaattagggtgcagacttggggctctggggaagtaactggccctctttgtgtctggcttcccatcagtaaaatggggtttgataataagtctagagatccctaattctgtacctgctgagtcaaaagctgctttgtatttcactgtgtattttgccagagtaacgactaggaagcagccccttgttcctagagcactttgagagccttagatgaaagacacaatatatgtacaaagtattattattattgatgggtttgtgtagctcccattaacgctgatgggagttacgcatgtgaattggcaagagaatagacccctcagtgtttagagcacatgaaatttacattttttccagtgctgtaattgagatgttgacaaattggagaatattgatgagcctttgttttaagtatttcgtgccaagtttgttttatttttcctggtttgaacaatggtatgggttcagccgcaatgaataaaaagggtagagtaaagataactttgtatttcaatattttgatgtgccaatatgaaataaattgtcttaggcaaatggaatatgctgttttaatcattagctatgcatgaaagaaaaattgatgttgacatctttgctgtaaaatcgttgtaatggggccttccttacaattcatttttgtaaaattcattttgtacattttgcagcaattgaacaatccctgcactgtgaataggcaggattcccagaaataccgagacagttggcccagtaactgctgagctcacactgcacaccacacgcacgttaaccatactgttgccagacccagttaacctaaatacattagcattctagaatctatattgctctaatctttcaggacacagggctgtacaagccagcatagttctccctaactctgccacctaccacgtccctctgttgatgtccccatctattttccaggcgatgaggctagaattcctcatagctagatatttatttatgtattatacagttgtttagcaatcatggtgttgaaacctacaaatatctccttagtagtgaatgtaagtgtttataggtaagcaaatgtctaagatagtattgcacttttgagcttataatacatgttatagttataaaatagtatttttttcccaccaaagtattccagttatatatttaaagaggaggagggggcttcaaacccacttactgtgggtcctgaatatgttctactgggatttcttattcagtctaggaaaactctgtcaatggaatgttttcatagtggcggcaatctctttaaaataaccctaaatacaatatgacagatgccatctggcataatcttttgctagttgcttctaacttttatttttcctagagctaagttcatccaaaactggtcacttactgttatgataaatacaatgacattttttttccttcctgtcctcctaattgtgtcaaaaaaattctgtgagactataattgataattgaacattgccatagaataaactgttgtatatggactatttacattgcattttctttctcttttctccccccaaataaaatttaaaataatgccattctttaaccatcagcaaacatccaaagattttctgttgatttttctcaagactttttagagtagtaaccattagaagtaaaattaaattcttctaataaataaatgctctaggagcatgtaatggtgcccataaatgcttaaaaggtttctataattgctgttaattttgagtaatttcttcctatatgtatcaacttacttgagaaacccagatttgggatttctagattttttttttaactgagtcatgtaaagggatgtctcctgatgccagttagagtttaatttagagtagtaattaaacttgaatactgcctcataaacaaaagataaacaataaaccagccacgttccctgctgtttcatagctttctttcccagatgttttagcctgataatttttacacagtgaactacctaacatggagttttgtggacagaggtagaaaatgagttttcttttttggtgtttttttttttttttttttttttttttggttgttttttcctggcaatccttttttccttccaaaaagcaaaatgcaaaggatttttcattatttagatttttttaaaactctggtgaaatagatatttaatggagatgtgctttaatggtaactatggtttttttccttagatattgctttttttttttttcaaaattaatttggtcatgaatgtctttcacatctggtaattgaaagagaaccatatttttatttaagtaaaatctcgataataagtcaaagaaagaaaagcttgacagtggagaatttttctttttacccttcttgccacttctcaccggcatgcattcccactcacggccagtgttactctatggctctgctcttccttgggctacaagggtttctctgtccagttctagactcttccactgtcagccatgatctttctaattgtcaggtacgagtcagccgttcaatgcagaagccatgttattttcactgggtggggtaattactgaaagctgagaatagctgcactaaagacagagggatactttcatgatcccattagcataagagtgggtaaattattcatgccaagtgaggattctatggggaaaagtatagttaatgcacatagtttttaaatgtatccctttctgctctgagactaaattcttgttggaatcagttctcagacatttacgggaaagctctggtggcgtgttagatgcagttcatctctctctgtttgcagcgctctcaatagagaccatctggcaaagatccaaaaggtgattaaacaaaatgatcagctcttgttgctgtgttacatgtccaatactctggattaaaaaacatgacccaggacagtcaagctaacgtcatgccgcgcccccttccccctcccctctcggtataagaattcagatggtccacaaatgtgtgtgccatctttgtgtccttatggcccataatcatgaacaggttgtgcaaatggctctttctgtagcactgtctgttccagcaccatagaagcatttcatattaattgggtcagtctaatattcatattgacatggggaaaaattactaaaatttattcttatagcagacaatgaatatgtgtgctttctgccatgagggaagtgaaatctgacaactggcttgtgcaactgattaatttttcttgaaactggagaaaatcaaagcatgaaaaactgtcattctctgaaagcaatgcacaacccttttataactaaacaaaatggattgggtagggggctttcggggaacttgtagaaatgagctctggttttaacgccataatcagggatgagtttacagtgccattcagaagagtcctccctcctcataaacaagctgataatcacagggaagctgacttccaattagcttctcctttcctcacacggatcagggtatttatatgtcctccttgagctttgatatgtcactactgagttagtacatctcgtgtcaaatttgaaagtttggaaataaaatgttttattatgaggaaatcctgctaataagcaaggtaattttcaaccaatcatttcacgactgagttaaggtaaaaatgccaagatttgtgactaagggacagatgtatcttatctttgggggtctgcaccaaatgccaaggagaaatataaattgaacaaaccagacattgtgaggaagtgattgaagaaatattgagatgaaatcttggaatgaaatatatatgtatatttataacaatgctgtgaattgcttacatgtcacatttgcataagcctgaactgggattttattaaggggcagtttagttaaggcaaaacataagactattaactcattaggtgactcagagattacagctgaccatttaatattgtggaaatagtctatgactcatattataggataaatttaagtgcaaatgtcaaggaagagaataaagcagaaaagaaaaaattctcaaaaaccactttaaaacatcatcattccttgtcagccatgctttctaaggaagagtaaagcagtaggtaagaaatacagatgggcacaggactcagggaggggaagtgagggtcccctagagtcagtgctgtgtgccagatgaaagggactcacatagccttgggggtcttaaggctattatagggcaactcatgctctgttatcatgctgatttttcaattgatttttggctgaacagtacttgttgaagccctccagagcaccaaacacagccttatggtgctatacattgtaatacacgtgttctatttttcccttcattgtctttactttgcttcagaagaatagtctgtgatgacgccatgttattttttccccttctttctttccgatttctaccctcagagagtttgttgaaagtcttattgcttttttgctggggaggagggtagtaggagaatcactttttattttcacatgtggaaatttgcttttaatttggcctttaaaaatattttatgtcacagcagacaataatatacaccacttttatataccaaatttatccctcggtagtcttgagttattcactatctttctgaggaccagcaaaaaagcaacaacggggtttcactgaaatctagttcctcattaaaatgaaagtgaaccactttagtatccctgctatacagcaataagtttcctcagcttgctggaacacaaggtctcgaaaaaaaaaataatgaaagagacctagagggagtgtgtccttctcttctgcctgccttggaaattcgtacagatgaaaatcctgttctgatattatcttctctgtgagccttcctgatctgcccaggtatgaggccgtggctccttctctgcactcccatggcactttttacctctattataacatctttcacactgcgttgtaattatttgattcctagtctctctctctctccctgcttttccaaggtgcagattatcacttcttcgattatctggcattagtatgtccatttttgaagcaataaacaaaatccacagatttttcttttttccttttttaagatgtataagttgatcaaaacttggtgtgtattggttcactgatgtgtgcctgaacataaatgaactctttggaacgtatggatatattccatcaaattccattacatctttaagagataaaaattattttgttttactgaacttatgttgtattcattactgtcttaaatatgtcaatggaccatcagctcaaacttagcattatttcgttgtaggtaggttcttaaattttaggtttctattttaagtattactttaagatagtacttaaaatgggacttatttgtcctttaatgtcttatattatgtgcatatggtcagaatttggagatgcaatttcattatgttatctatacaaaatgtatagatggatgtctttaaatgtaatggtatatctaatagtggaaaattgcttggtgtggcaaatagttctcatggactcaggatccattttgctaataagtgttgtttaggataggattgacctcatggaagtcattggtgggtcttcacacacaggtaaaggagcctggaagtatttcatgaatttttaggccccacctcctgttgtcgattttctacacatgtcctccagattttcatagtttgcatttgggcaaatataattatttttggtgatgcaagcaaaaccttgtagtgagttctttttcatctacatgggttactgtctagaatcttgaactatgagtcgagacctatgctcaaaagtcatgattgcattgaaaagggcacagacctagaagacagagagacatgagttccaatcccagttttactcaatatctgccagattcagtcactacatctggaaagtgaagtgcttaatataatctcacttatattaagagagattccatgtgttcagcaaataacattgcctggaaccagtaaccgttggttcctttattactctctctcttccctttgtcctatgctgacattaattagctatatgaccttggctgtgtcctttaatctctttggacttttgctcacctgtaaaataagattgaattagatgatcttttaaatccaagctccagaaatctaatgtttccattcatgggtcttaatttttatttgtacattttatcttttaacataaagggaggccacaagcttttcatctggggtataacatgaactttttaatttttttgatttattatacacagtgaagtaatatttctgtttcttgtttttggttgccaggagagcctttttcttctcagtttggcaaaaatatgactaggcattagagtttattttctgaggatagtggaatgccacaattcagatataggacatctaaggtggtagtattaataccaatagactgttctatctgctaaaatatgaggcgtgttttgaaaacacagagcaacgtctccatcctccattatctaattagaactcactcagttggaattttctatacttcacaagtggaacaataaacgatcattattacagaggctgagattctacccactcctgaaatatgttccaaatcattccagaaaaaaacctaaataattttcaggagaattttacagttacatatatatttagccaaattataattatttagactgtaaattcatataaaatatagataagtaccttatcttagtcaatgaaatatttgtttaatcaaaacacttattccttaacccttccagctggagatatgactcttgcctcaaaaccaatcattctttttttataagtttgaagatttacgaaagtagactgggagtgtaaaatttcatatctcttcttccaactaacatttgtaacaaatgccatccactaaaataaaactttcaaaatttccatgtactaaatgtgaaagatgaaaaaaagttgataaatcattgattattggaagcttatggactctacctcatggatgtccttttctgacaggttgtcacacactggggctgatgtgtagatgcacaccactctctggagtcagggagctctcactctctcaagacctcttcttagtgtaggctgtttaaatttaatacacaaagatattcattgagcaaggcaccttgggaataaaaatatggaaatcacaagggtccttatcttcaacggcttaccttctcccaagatgtgtgtttgtgtgtgtatgtggtggtggggggagtaccatgacaaatgtgcaagtaactcttacacatggcaggtactcagttatagggggagcttgttgcagattaaacggcagttttggaagcaggtggatctgaacattcctctttgccctgccacttccaagcagcaatatttctgaatgtttgtttcttcacctgtaaaatgggaataataactgtctcatagggcagttgttaggattaaattagcacttgcttttaaaaagtccattttggtgactgactaatagtggagccccaaaattattctcttcattgaacatttatggaccatataattgtgtcaagtactgtcctgggttctagggtatgaagcaaacaagatgtgatctctttcctcagcaagttggtaatatttagtaagcaactcagaaaggtaaacgaataaatacacatgcttctaatgttgcatttaacatataggttgtaaggtatttcagaagagggagtgattacttctgtctgaaacatctgtggaagtcttcacaaaattcggaaggttttaaaagattttgatggtgggggaaggggggagggatattattaggagatatacctaatgttaaatgacgagttaatgggtgcagcacaccaacatggcacatgtatacatatgtaactaacccgcacattgtgcacatgtaccctaaaacttaaagtataatacaaaataaataaataaataaagattttgatggccttcagtgggtgtttccaaatggaaaaagtagggaaggtgcagggagcagataaaacagccagcgcgaaggcgcataagtgtgatgcagtatattgtgcatggagcaacaactgggttgatattgctgtttgtatgagagaatgcatggtgaaaaaaaagaggctggagaggcaagtgggtgcgtacatgaagatccttttttaccacactaagaagcttatgcttaatcctgtagagcactgtttaccaaactttcctggtgataagtagctcctcagatgcatataaatacagattccctggcacaccacagaccacaggaattacacaaccaggactttccagtgggaaatgctgggaatctgattttccaggccatatgcctgggaaaccctgttctgggatgtgaataactcattttaaagaagtttaagcaaaaggagtttatgatggggtttacatttttaaaaataactcttgtagaatgtggagaatacatttgagagaaagaagactccatatagaatatagattaatagtctagaaggtgggtgcgtgttgaatgaaagtattggcagtagagttggaggggagaggactgacattacatgtggggagaaaggaagaggacaaagtccacagtaacatgcaggtctctccctcagtgcaggcaccatagtcgaggtagttttctttttccctgccatgtgtttgaagtatgcatatctaccaaccagtagagaagaggaggaagaatatttcatttgcacatgcaaagttgtcaaagtggaaacgcttgatgcatgttgggtgaataatgattctttttggggcatagagcactcacaggcaatgtagcatagtggttaaaggtatggcctctagtgttggcctacgtgcctttatatcctcagatctgtcacttatcatgggcaaatctcccatccttcactttacatctgtaaaaggagggtaataaataatacctaatctaatagatttggagtggaaagtagggattaaatgaggtgatttatgtaaaatgatagtaattttatgcctcattcatagtaagtaaatgttataaatatgttttatttaaaagttgctttcaaaataattgaaaactgaccccatgcaacaaacatcatgatgaagaactaaaaatgaaatcccacatttatccctggaaaagagaagttatgaatccctggaaaagagaagttatgaattgtaaagctagaaaagcatccacctactctaagcctggccccaagccccaagcccggacttctagttggaagcagatcttttcctctgaagtctgattacacatttcggacacacgaggttcccctggtgctacagtaattggttacatgacttacttattatcttgcttgactgtaagattcttgaggacagtttctatgttttaggcatctcctccctcttctagcccccactgtgctacaataatataggaggccttcaataataattatttttttttgaaaggaagattgggtccatattgtgaaggacattgaatagcagactggggagtttgtgcttgatttgctaggtaatagggacctattgaacaattttgaatgggggtagtgacataattgccttccttttgaataccaatgacaaattctctgctatgtcctccatggtcaaaatagcagacccgtatgcttccctgaaatacggcctgtttgaaagactggatattcttttgagggaagaagcaaatttcaaatagctctttaaaaaaaataaagctttgacattctctctaaagtactttaggcacttaaattattgtgattccttagatcccatgtatgtgacaccattctagaaacttgtagacagggcacaagggcacatttttataaatttttttagcattgttgcaattattaacacctagggatgacttaacaggattgagtaaatatatcttcttcaatatttagaaaactatggttccaagaatatttaaataggcattactttaaatgaacaaacaaacagaaacaaaaaagaactttgtggttaaatagattgaaagctgcagtagagcagggtatcctctgctacaggaatgttcagatcccctaatttgctaatatgcatttcaagtctgcaaagtgtggagagacagagctttccagactcatttaaccattgaaacgcttttatgcattatctctgggggccagtctttctcagaacacactctggaaaatgtggtccgggactctgcttctctcattgaagtacctttggatagagtttaattttgtagggagtcttcctgcatcttgtttttaagaggtgggtcagcatgggctcaggatcaattttcaattgtaattgtgtaaaaataacttcctttatattcagaagtctcatggacttccactatacttgtgcagaatgttccattaacccagctctccatgtagttattcttcattgtattaatcaaacaatgtgccttgaatatcccttgagtgtttcattaaaagtaagcacatttggttacaccctctaaaatgtataaatgaggatcccagcagacttttactcttgacatgaattgtattaacaactagcttgatgcatttttttttaagcggccattgagttggaggttgggtggcaaatccatgaaagaggaaggaggtgagaaaacaacaatctttcctcatttggagtggatggcttggttctgcttgctgcaggtggtgagcaatggactggatatactgtccacccatgggaaatttctgggaaacagctgcaaaaccccaccttgtctacatctcactgtcctagatctctggtttagcaaatattagaactggttgccactgatgggtgttgcatctactgtccataaatttttcgctgactctcttattgttggaggatcccagaaggtatttttgtcatgatcggggcattcaggaggtctagaattacagtccctcttggttatcaagtgaggtgaaactcttctgcattcctacattctacccctcagtaatgtgtggggggattgcccacttggatgtgtcacacccccttttggctgtgggaaggagaattaggctgggtataccttgtctctccaattttgaaatgaccaagaagaggcttgtggtacagttaagactatctttgccatatgatgagaaaaagttgattttgtcttgtttgtcaagagactttctgcaagattttgaacgcttcatagcagttagctcagaaaactgcaatacctctaaagaatgttcttcctattttatacataggaacatagacatattgggagaatcagtgacctttaacatcatcaatcaccttaaaaaactgagagtagaaacagaatttctcttctttatccaaccagactgatgtttctacacacatgcactacatatcctagcatagttattagccactaaatggatgagagttttctctctatttcttgttctaaaaggaattctagatgctcattttctgccagtataaaatatgagttgctttcagctggcaaaaaagaaaaaaagaaattgggccctggctaacgtaaaattacagcaaaaataatgtgtcagactttttaaaaattagaggaaaaattggtacttttatacattggtatgttatactaaatgttgggcatttaatgcagaaatatcacagaagcttccctttgaacattgatagggaccttgaaacctgctgctttgtaggcagatagtgaaagtggaaaatgaagttcatggacgtcttcctaccttatataacatctctaccctagagacagtaatctctgaagctgtgacttaactttttcatgtgcatggaggtaactcctaaaaaaaaaagattttacttaaacctgacctctttctagtcatgttgtctagtaacatttgcttagtttttatggtacacttgccagtaggaggtaaggaaaacaagaattgaaaaatcaatcttgattatggagggccactcatctagtgcttattttgtaggtcagctctgtgtagcaccctcataatgagtgcggagtgctcagtgcttagtttgtgataaatacacattggttgaataaattgttgcaatttgacgattggttaatagctagtaatttgtgacaacttagaatttgctagcattgacatagggtttcgttcctcattagggatgttagcactcccaaaatttgttgagtttgtcaaagcgtcagtcaccaaatctgtgatgcatttattaggtagaattgagtagtcataggtagaagaaagcaggatacaaagtcatggcttgagattcctccaactcctgcaaacttaagggaagtgattccacactttatagagagattataattcaaaactcaaatgctcataactttgttcttaagagcatgaaatttgaagttagacctaagtctgaattctgactcccacatgcaatgtgacctctggtgactgatttaattcttcgaagcctaaatttcctcatttctaaaatggagttaaccatgcctgtctcatagaaatggtgtgagaatgaaattagataatatatttgaagatctatgtgctgggttgggcatctataatacaatatgctccataaatgtgaataataataatagcaattaagtgataataatatgcatgtgaccaccggctttattagttttggttccatagcttgaactttaagcccacatcacttatcactttctgtaaatttctatttcaggatacagtataatatgatttcttaaaacaagagaacaatagctcaagacactttctttctctattttcttctgttttttgtttgtttgttttataacacagacatacaaacatgggcagggtttggagcagaaggagtctcaggaaaaggcttcaaatctgggagaagtatgaggtcaaaattctcagtttcctgtgtaccatggtttggtactcagtcaaatgctgtcccattctaatttttttttttttttaatttctgatttctgttttctgcctaaagaccagaagaaagtgagctcagcagaccagagtctgaatgtgggccttctagttagccccaattcagttggaggtatgacgtgggacagctttaggaggcctggaggttatgggctcagacataagggtgggagagcctgggcaaggttccattctttactacctataaactaggcttttaccttgtaaaggaatttggtggaaggcataaggtgataatgtatacctggcacgttataaccatctgttaaaaattagttactgcagtctggacaacgtggtgaaaccctgtctctacaaaaaatacaaaaattagccagacatgatggtgcacacctgtaatcacagctgcttgggaggctgagacagaaggatcgcttgagcccaggagatggaggttgcagtgagccgagatcatgccactgcactccagcctgggtgacagagtgacaccctatctcaaaaaaaaaaaaaaaaaaagagttagttgctggctgggcatggtgactcatgtaatcccagaactttgggaggccaaagcaggtgaatcacttaaagccaggtattcgagactaggctgggcaacaaagcaagaccccatctctacaaaaaaaacaaaaaagttagctgggcacaatggcatgcacctatagtcccagctcttcaggagactgaggcaggaggatcccttgatcaaccaggagtttgaggttgctatgagctatgatcacaccactgcactccagcctgggcaacagagtgagaccacatctctacaaaaaataaagttagttgctcttaatactatcattatctctttaagctctcatggactcacatttctgtgtgattaggatgttaggggatttctaagttttctccaactctagcatgctgtatctattacttttcaaatgatattatttaaaactcaagttatgtctgcaaaggaatactgtatatttagtgttacctttcttaatgtaggtttctaatgcatttttacataaatttttgtttgattcccccagaatttttcagatttatccccattttccagatgaagtggcttggccttggagagggtcagttacttgactgtcacgatagaaagaggaagcagaagaatgaagacaaagccatttaaaattttcttgttctttaccttttgcataaaaggtattcagttcacaaatgatgtaaaatttaattaaggcaagtgactgtcctgagaaagtcattaaaaccctcatgtcatttctctaatcaaaaggctgccacgcttctattatttctttattacaaccctttatttttatttcttcaagttaaactggagcctgagccatcataagcctcttgctagtgattttttaaatcagtgatttacactttgaaaaaccaattttttttatttttccaatttatattggttagatccatagggtcactttgattagaaaagagagccattagaaattaaattggcaattctaaagggttagttatcttctccttgttcttagaaatggcaaagaatacaagaggtgctgaaggctaagataatgagactacttctcttgtgggactttccaaaactcctatgtcatagtcatcaacttatatataagtaaaaatgcttatttgtgttttagcatttgctctttgcatcaaacctccactgactttgggaataataagatctgctaccccaagaaagtctgccaattccattagtaacacattcaactggatcaaaaaactgaagagttagtgaatattttatatcgtgggtttttaaaagatatttttgtgtgaataaaaaaggactttctcaaagctgctcatttcaattttcttttaaatttgctcaccaacaccgcttaatcacctctgtaacctactggaagtgttctctagatgggctttaaaaattaagccaagttgatttcttttttgttataaattggcttagcatcttgtttttatctggcttgaaatattgaagcagtaaaataaaaccacactctttaattgaaaggtgcttctgcagtattcaaaccacagttgtcagtcacacgtgttgttcaaattcttcagagctccgaaattacttaaaggtatcctcagtattctgagagagttatttttgccccactacaaaataaaaaagagccaatcagggctttctcaactctttggcagtatttttcctctaaagaatttcttgacactctctttagttcttgacttccagggttgttcctgacaaatctccagaaatgtatctcagtgcctatagtagtgtcaaaagcatgaagccacatgtctagatgttgtgaccttacatttcattgccagcagttcactatataaagtgcttaaactgccacctacctaagggcttccagaatttacattatgcacttttgaaagggcatactttgaattgagactatgtaagtacttctaatctctagttgacctgatcttgaaaacttctgaaaaatattacatcatgagtgatcataggaatgagaatgatatttcagcataatttcaaaatcacgtagtatcctatgttcaaagttttctgtgctaaagatctaaaaagcacattttgaaaatatctagttatctttggctcaacatttcaatgggaattagttgcctaagaaatgataccagacaatagataatttattccctctttagaaatgttgtagttgtttgttgatttttactcactggattgggtttgtggtttaaagagaagttaatcctgactttcttaaaacctatagagtttcaggatttcttaaagacaatggcttttgatactccaatccaatccattttcccatgcgtaagtgttcttataaccttcctttgctcaagttctaggacaatgtcgatggtgtctacacagttaaaattaatttgaaagttgaccaattattcaattattttgactaatgaaaatcaaaaatagtattccattttgcatagcagtaagaaattagcctaaatgtaactaatcaattcactttgcctgtgcaaatatgttttattgtatcatttgctgtaaggattgctaatattattcataatgtcctttttattttaaacttttataagtgatatggttttttgtttacaattggggtcatatatattactacatatttacgttgtaaatatgtttttatgtaaatatacaaaagaaaaatagaaaaaatagagatttcttatcagcattatatactaacgtagtatctgcattgctggtttgctttctgtcctgaaaataagtggatatgtacacagatgtctttaatttcctagttttctatttagttgatatattgtatggagacacaaatgaggtattttctctcttttgatatcttaagttttaaaatatgttattttattttggttgagataatgtgtaagttatcactggaccttaagttctatttagtttttgcttttacagactaaatgctgtcttcgcatatcattacttaacccaccataaaatccttctgatcaagtttttcatatatgggacaaaaaaatcgttttgtttcaaatcttgaccagttctagcctaagaactgtttgacttaagcaagaatttcaacacagatcttgcagcttaacacccattggtgaagaaatattttctctttatattagttcatttttcatggcttctttatagtgtcatatgctattaggaaggagaaaagctaatgtgatatgtgaactaatttcttgtttaaaaattttaaagagtgccatctggaattcaatcaccatctttccagatactagctttatcgtaatctgagactcagttctatttgattattaccattgatagacagaaaaaagtgctagatcaaggaaaagtacctatgatatgtatacccaaatatggcagcaatagcaagattatcatcattattatagctaatgcttgacagctactctatgcccaacattgtgctgtacgtttagtataatttaatcctcataagcttgtgtgggtttttcagttgggaaaactgaggcttagagagactaagaaacttccctttacctggaatatctagaaagtggtggggctaagattgtaaatcaggtctatctaatccctaaatccagacacttaaccagggtaccacaccctgtctgcaagaaaagttgtcaaatgatgtcggatacctagcagtcctgcacagtagtgcacgccagtaatcccatctatttgggaggctgaggcaggaagatcacctgaggccagaagtttgcgtccaccctgagcaacatagtgagaccttatctctaaaagaaaaaacaaaatgctcttagatacctgttgtcagacctaaaatatgggctagagatgttccctcattctgaaagcttcaggtgggttttggtattttctatcatatgcctggacatttcagtaaagttgttttgatgctttctaggtcataatggtaacggagatcagctcttttctaaaaatccaccctgtaagtattgatttggtgacaggcttgtaatgccatatatggttttagaaaattactgatagtttggaattgccatactgaagagacgtcttaccccatccttgaagatgaacatttctctgacatcatttcaagtgtcaagtgaacaaagttttctaagctactgatcttgatgaacaggatgatgattaaggcacagaaatcactggtttccaatttttaaaaatacattccaaaaacatatggcacataacagaattcaacagaagaaggtaaatttggttaaattcttcaggggtccttatatgtaaatttgatgccatacagttgccctcactaggataaaattagaatttgtgaaggatctgattggaatttctcctgggaagttgtagaggatgagcatggatatttgttttgatttaaatattggcctgttcaatctccatgatcgtaggacaagatcactgacaaagcaagaagacagtaaagttgtacgtttccgtcttctttgtgaaagatctctccttctgtctctttgactacatccttggagtataccatcccttctgtggccttatgtttttgcaactaaaactttattgatttctactgcttattacaagttttgacatagaaggagggacattcacaaatgattttcttggcctactttagcaatccttctttttctctaagaaaacaagtcagaatctgtcacactgtaatgatacttaggcccctgctgttcctaggctgggcattgaaattatgccaagggcatcagtaagagggaggactagcttgtcaagttagtgccacatgcaaagagtattggcctggagatcagagagctgtgagtcatgggtcacactgccttacctgggcacctgaatctgtggaaagttcttgagtcttttattataacttgttgctcctcaggcagcgtgaaaacctttagtaggcttctgagctgatgactgacactagtgtgtcaggagctccaagttctggtctagctataatttcccctaagacatttacttgaagaaataaaacattttattttgaaatttttaaattatattaatttttaaaatatcctgcttgcttttttcaaacagttttaagattttttgaaaagttattttaagatgttttatggctgccattttatttataggaagatatccagattttgaaagttaagaggaaatgctatacttctgaaaagtttcagaaaaactcgtttggtgactgtaaatcttagtttctacaaccatctccccaaaagtccagaattcctgcctccttttataatttatttcaaagaaataattttgtcatttaggattttttaaagtgttaaaggcaagtattgaaagattttatgctagctcaagtccctaatgaatgacttaacaaggtagacatggcaaccagctgcttctgaagatattcttaatgtgtaaatttttagtgcggctacctctgcaactacaaaccctcatcttagtagtttggtgattttaccctaaagacctatatgttaaagatattttataaatacgagtgcagtcattgttttgtatagtattttatggattatagaaactagtctgtttcctgggtgaaatttaattagctatctctgcccttaaacacttctgccggcctcgatgaccttctcttagggcacctggtatattgcagcactttaacatgatgcctttcaagaaggcatcccaatccctttaatccccatcttccgtctgtttgaccccttcttcattgctacagttagaagaatatttgtgtgcacccagtgagaaggtttattttgactttatagatgggatatctagagctggagtcctatattcaggtaaggtaataccacaggatgaaaaatgcagccttgggtagccgcaccccctaagaggatcagatacaaatctgtacaggacctaaccatgcctatttaaaattactaactgcatcatgtattctctgtagagagttcttaactttttcattaatttccttccttgattgataaggctgccaagtgtgtgataccctcaaagtagatgataattaaattcataccacttcattattaaacacctgttttccttcccagattcccttggcagataaaacatgattccagcccacaagttcttatttttagggccattctctacaattgttagaattgtaccgaatccctgcactctgtagctgatgccaaatgccaagcatcagattcacagtaacagaaatggtgatgagcttagaatcattacgagatcataaacatgtgttttattcaccttgtttagctgggtcccacccagtcttatttgaaaagttcagaaaccaatttcttctctcatgtagtttttttttctttttgagtctgtgtcataattttttattttcaattaccttccaaacaccccatgaaacgtatagagcacacgttcaggggttacagatactaaactggcaaatatggtggtacacgataacttcctggaactaaagtgtcaatgtagaatatgtgcttaattgaacactccatgatacggtttgtagaacactgaaatacctaccctaagaaaagtgtgtagaaccagagaccttaaagtttgtagattacaccaaacaaaactatatactttcttaagaatatgtatttttgtcagttcctgttaatccaaggtagctaaaaggtggtatgttgaagcccaaaatgaattttgaaaaatgtaactcttagagagtttgctcatgcctgtaatcccagtgctttgggaggctgagatgggagaatcacttgaggccaggagttcaagactagtctgggcaacatggcaagacccccagctctacaaaatatttaaaaaattagtcaggcatggtggcatgcacctgtagccctagttacttgagaggctgagacaggaagatcacttgaggaccgtatcatagctcatggaggctgcagtgagctatgatcatgccactgccctccagcctgcgtgacagcgtgagaccctgtttctaaaaaaagaatttttttttttgagacagactctcgctggagtgcagtggcatgatctcagcaaactgcaacctccacctcccaggcgcaagcgattctcttgcctcagcctcctgagtagctgggaccacaggtgtgtgccaccacacccagctaatttatgtttgtatttttagtagagatggagtttcattgtgtcgaccaggctggtctctaactcctggcctcaactgattcacccacctcagccttccgaagtgctgggatcacaagcataagccatcacaccttgcctaaaagtacattttttaattaaaaaaaaaaaagaaggcagtacacttaggaaaattttatttatctgcaagcctcagtatcctaaagacatgtaataacttggatcccatttctgaggctatttaattaagcttttttgaataaacaagtgcacgtaatgcttagctgtacagaaattatcagtgtccttagcttctattgcttagtactaggccaaataatttgaaagagcctgtaattctttatctcccatatgtaacatgtcagccatgactattttactttactcttaaatatataatttataaatagaagcaatgttgatagactcgtttgactcccttctagaaataaatgactcattctggattgcatgtgagagcttcaagctgctctaagtaacaatccacgacaatgagaaaattgttatattattcatctgggcagcaggaaattaaaaaaataaaaaagcagtctgctcccctagtaactgggaccttttgtgtgttacagatcactgagggcaaactttgcatcagttctgggcactgggcaaataaacttatctcctcgtttttgtttttgtaccttgtcataaactatgtagattgttggtcatttaaatacaagtgaatatatgcattaatcaaaaagttatcttaattttttaatgattcttacagaacagtcttttcttttagatcatttttttctatttgtaattttgtatttattcaaaatatgtatgtttgctttaaaaatggggttttccttttgaaagaaatcccctggaaaagggtcacctctgttttctttggaaatgcaggaaatcaacatgtcctctggcagttatttttcctcataatatgcccagtaaaagtggtggaatcttgacccaggtgatctgtggagcctttgctgatgaatttggtgccactgctgtcctcattgttttgaaattaaagagacaagtggtaatagaaagaggaaaacacatttttaatgcagaaatcatttagacctgcaaagtttgttgcccactgaggaaagagctctgttagtggtgactgcacagatcacatgatacaaccttttgacaactgagtgtctgccggagacgtctgtgagagatgaccttttgacctaggaaggaatgctgtgaaggtgggaatgtactctcagccctggcccaggagagaacgttgaaaacagccccagcttctctgctcacaggatctagcttggttttcgctttgactgtagtatcagacgataaaaacttgagagcgtttcctaaaattcttccagacctttactattactcccaccctgtgtaatagagtgaaaaataatatgagttatcctataaatgtgtgttgcaggtgacttgagaaatcagttgttctccctaccagctcgtgggctggaacccacatcttgacctgttttcaggcagggaattaagcccatgcacgatcctttgggggccttaggtgggtgtggggggagtagggagaaaagaatgagtccattgctgtagaagcattcccagtagcgatgatcttcgtaggaacaaaaatccattgtacagggctgtaacctgagaaactttctgttatcgtgcttgttttactcaccaacattgatccccggtacatgtgaccctttgaaaagaagcaccatgttggtgattcctcttattactaaataccattgtgtttataatggccatttatatatggttacactccacgcccgtgtggttaataggcgttctctaactctctgatgccacctgaccagcacaggatacaagcctcggcttcttgattactctctttaccctgtcgtctgtcattctgtgatgttctctgtgaaaacaaagtagagagcttaacattgctgaaaatagggtagcacaaactctaccggggggaaaaaagacaaaaaagcctagtaaagccttgaaaaaaataggttactttatttatttatttatttattttttcagttccacaatatgtctgcatgctttggcactgatttctcagctagttgggtcccaggaggccccgttgagccctttactgctcagggagttgccgctttagaaaatgggggaaaaatgtagtttgtatgaattgttctttaccttggtttgggttcagaatggcagctgcactccgactttgtgtgtgacagcacaaaggccagcaaaactgaaaagcaagtcagcaagtagagagacaaaagcaacgatcagctaatacagctccacatggcctgactaatttatgagaaaaaaactgttctgttcattggatcagcactctgaggaggcaggtggaattgtaggaagttttcattgactctcccgagcaactaaggacgccacgagagattcttctcagtttgaactttatcagggtctacgcttaatcaatagagtattggaaaaagaattaattactaaagcagaataaaacagctgcattttaaactaaggatccatcaattcggtaatcttccagttacaggctaggtgccgtgaggatttgactccatgtaatgaggaacccggggagtttcctcatgaacaggctgggaattcacattagcctgtttcagctatttgtcattagtacaactcatttctcctcttctgcattacaatttgtattttatgtactgtggaacccacgaaattcccacattcatgggagggagggcgttaaggcggaaatcattgtcaccctgagaaagagtcttaacctagctcggcctctttattctggaagctgccgcgggagcggttcggagctggaccctgctccattgtgcccagggtgggggtcagggcccccgcctgttgaagacacactggtttgaacccagcctggaaatgtttcatctataatttccataatggtggatttcaaggagggctgaggagggttatgggagatgaattaggtttttagtgagctcattaggaagccaaacagagttgagacacaaggcagtgagcggggctgtaatcagttctgctcgctttgttccctgcctccgggacatgtttcgaaaactttctggcgggggctgccgagccggtgctcaggcgaagctgccgtcctggtggctgacttgttgatttgtaaacctcttaattcattttttttgttcaatttaatcttttctttctgaaggaaaattagttgaatgttagccctctttgcactattcacctcttaaattatgctcattttgaagagcttgttatgcctgaataaacatgaaatgacttggcattttcccatcagaggcacacccattttaacaccatgtatttaccattcctggaaatgtctcattaacttctgaaaatctgcgagcatgatattttgggctactgtaacacacctcttggcagtcacagaaggcagtttggttaatgcctcataatatccatttttattctcaacatgaagaaagactctctatagaaaattgatgcagtttgctctgctaattttcatgctcattccaattaatttaacatgacccagattttcttcctcgggctcatcctgactaattagtaaagcaacacctagaacaagttatgtttaataacattgaggaacactagttgtgagtgattttgatgctaataaagatattcactgatgggacagatattttatgtcaattatggtatgtaatttagaagtcccaatgtgctgcttggagtatggaaaggctagcaaatcactacgggagataatagtgtttttaagacttccgcagcacctaaataaccactgggaccaattactttattttttgtggtagaactagcaggattgttaactgattccatggtaatgaaaggggtggagttgttgcattacaaacctgacccatattcaccagggccgagctttccgtacttagtgaaccttagcgagaaaagaaaagcaatcaggggcatcagaaagcagcatttgttcaaggagaaggagtggtttctccacctctgtggttggcgttcttttatcacatttttgtcagtgagatgaatcaattttactgcttacagcaaggttgaaggtggtggtggctgtggcagtggtggaaggtttccgaagtcgagtaatgttgtttaatgttgagagctctccacattctcatgaggaaaacagttgaaagtgaggctctaggaagtggggggaaaaacacacacacacagggaagaattatatttattttatttctaacaagtatttcatcagtgcctatgatgtgccaggcactgttctatgtgctaggagtaaggagggataggaaaaccccagtgcctgtccccaggatgcttacgttcatagtcgaatgtatatttcctattgtcttaagttgatcaaccacaaaatcttggcatgaattactcaatagggtatagaaatgttatgaggttttataggagaatgggaaattctggacagatggactctgagctctcagagatagccatcataggatgcagtcaattggtgtcatccctgtttctgcactgttacctataagaccttgggcaaattgctccacctctctaagccttagtttcttcatgtggaaaatgtcaactctcataggatgatgagaattaaacaaaggaattcatataaagtgtttagcagagtgtctggaagagagtaagtgctcaataaatattattttgtattaatgctgtcgttattctagaaaacacttagagtgaaaatttctctagcggcatataatagaatgtacgctaatcatttctcaatgctaattactgctgttgaaatttgaaattagaattgacaggaatacttcctttttctaaatatcacaaacaggcttctttctacatccctctttaaaaacacacaaagttatgctgggcacggtggctcagcctataatcttagcactttgggaggttgagacaggagaatcgcttgagctcacaagttggagacaagcctgggcaatatagggagacgccatcgctacagaaacattttaaaaatcagctgggtgtggtggcacatgcctgtagtcccagctattcagggggctgaggtgggtggatcgcttaagcctgggaagttgaggctgtggtaagccgtgatcattccacggcagtccagcctgggcaacagagatcctgtctcaaaaaacaaaacaaaacaaaacaaaacacaattaaaaacatgcaaagtctccccacctcctgatttttcattggcaagttttctgtgtgtaaaatcactggcctctcataggtcagggcttccatttttagaatttatttctactttatctttttcatctggtcaatacagaaagagaatgtaattgagggagattgtgagagtgaggctagacataaaaaacaagcaaattgaaaaatagaaaaagcaaaagaaaagccttattacaattgctagtaaagctggaaataatgctttatggaattgccattttggtagatcaaaaagtcaaatattagtgatttcagctggttcagcctaatattatcatacgccataagtaatggaaagtgctacaggcaaggcaagaagttaggaaaactttgacctcactcgctttatctgttaaatgcggataacagtctatgcccctacacttggttgtggtaatcaataattgaaaagaattatttgacagctgaaaaattattatatagatatgaggcatttttatccaagatcacatgtttcaaagtttagaacataagtctcacaataactaatccaatagttatctccctatcatgtcttgtggttgatgtatagaggatatcaacttcatttcccatcatatatatagaaaaactagatattttagtggaaattctatagattttaaaatatattttcaaaatgaaaacattctcttggttatatagttgttttcacattttttatcatttaaataatacagcacttttgggagaattttttctcccaaataatacagcagttttgggaaatttgcttgagaatctttgaaccttcacacacagtatgactcagaatataaatagttgaggaagtcattaccaacttcagtagatgtgcataaggtaaatcggacagttatgttttaagtgtgccaagaccctctgttaggaatagttttacagctatgaagtgaagttggcccctctccagtgattactgactggtggtagaaattgtgttctactgggtcagcggtgaattcctcactcaaatggtgtcgagtcagccggtttttaatttgttatcttctcaagagtgcattcgccaactttatcactgagaagaatgactccctagcctagtgtgatcaagatccggaaatttgctgtatcagcatattaaggttggactgctatttgattggtagctcttaggtctgatcttacagcaaagatgttacttctctcataggctggtttaccacaggtatatgaataaacctactgagaaagcaaaccccttcctttctttcctgggaaaaggttgaacaacttttcctctcaaacaaaaacctttacagttcctgttttattagctaacaggatctgaataaagccgtgttggtgcccttcgagttgtctttcttcatggcagaatggggatatgtcttggcaaactaataattacatggctttcagctcctcacctttctaggagaaaaagatggatgacaatcaggtatgaaaatgtttcccacttaagtagtagcacacgtgaccctttgcttttgtgccgttttgagatatgagtttcggaagaataaggaagaagatatttttataaagcaaatgtgtttttcaaccagcggtgactctattttcatttttcttatgtgaatgggtctttcgaataagtgaaagaaggaaggaaaaagagaatggaatggaactaacctttatcgattatctaatatgtgccaaatatcacacatctcaaaagtcagatggatcacttggccataattggccgatagtaagtgactgcttatccaggttcaaagccataaggcattgtttgccccacctttcacccaccctttaaaaatatgaattccatttctgtgtaagaatagagtctgtgtggtgagtagagagcatggacttgagttcaggatttagagttcaagacccagctgcattaccaactagccacgtgactttaggcgagtttcttaacctgtctggcttcagtttctgcttatattaaataggaattacactaccaaactctgaactgtcctgtggttgagatacagcctgctgaaactggcatgtagtagacagtccacaaatgttacttccatttcatccttatatggtggattcagggatttatctgaaggcatggagcaggctggcaagggctaatattatttctgtattttccattaattcttaatcttgagagtgctcagtctttcatgaatgatgtggttttcctctgaaattgtctaagatctccagtgtggtgtgagatattttacttagaaggaatgggttaagactgaatttcctgaaagttttaaaaagcaatttattaagaattacttttattatctttcaaagttattatcggtattttttttttgcaacttggatagttcttcgttaacaatatatcttataatgacatttgaacaatggagatattttttgtaaaatctgccaagtgcattctgaccacccaccttacatctttatgaagttaaagaaaattatataaatcaacacattcataaatattatgttgagcttctcctcacagcttctttcaaatgctgccccaaatcatccagaactttgctgcagttactgggagaattcccactacagcatctctgtattgaatgctgtactttccaccaaaatgtgttttatgccaaataacaggtttttgatgatttaactgtactttgcttattatttttatgaactttactgaggtataatttacatacaaaaattgcacccatttaaagtgtacaatttaataagttttggcagttgtatacactcacgagaccagcaccataatcaagatactacacgattccatcattacgccaaaatttccttacactccttttaatcactccctccctctatatatgtcctcaagtaaccactgatctgcttttggtcattatgtataagtttgcattttctagaatttaatatatttgaaatcatacagtatgtggccttttgcgtgtggctttctccatttagcatgatttcaaaatgtaccatgctgggggtatcagtagtttattcctttctgttgctgagtagtatttcagtgtgtggatataccacagtttgtttatccactcaaactggtttgttttaagaaaagaaataactaacatttattgatgcacctttgctatttcaggtactacatgaggctagatgttgtgtatgaagtccttaagtttgttaataagtataaagcattgggtacaaagtggggacacaatataagtaatagctctttctctcatgatttcatttaatttttatggttaacctgtcaggtatatgtaatttttcccgtttcacagatgaggaaactgaggttcagagggttaatcttttgactgaggtcatactcaaccaataaggaatagatctggggctggtccaagtgcagtggtgtttacaactaattgattaaaaccagtcacaggtttcttcatttcttcttcactcacactctttcactttgactagtcttaacaaatataaataagaaatagatctgaaaattcaacacaagatctgttttattccaaaactcatgcttcttccatcacatcaccatttccccccatgagtacgtgcttctgtgtttatgtgaggagggagtggaggggcagggtggagggacaaggactgcatcagaagccagtctccagtgtacaaacaaagtagtacaactgcccagagaaatagaaaaatgtcagatatttagaaaagtatgtcggatactcttcctaatttagggcccctgttctctattgtctgtttcaataaagttgcttcttccatggagtgtatcttacaagttaatgcctttgaaatttatgacacgtcaactctatggccaatttacacctcttagagacaaacattctagatagtttctgtttccaagttttagatataaacccacaaggcataaaagcatatttcaagaaataagagagccctccatccattcatttaataaaagcctaggcacaaactatacccataacatatatgaagttctaagaatatgagaaaaagagatatggtttttgacttgaaggagctttcaataattgggtagaaatgtaggcatgggatgtgggatgtgtgtgtgtgtatctgtttgtggaagtattctggagttctgagtgttaatgtaagccttggaagagcaaatatttgggctagggttttgctgtgatgcaatagaattgagagtggagaaggattaattttagtatgaaagtcaatatatgttctataatgcatatctttgtaatatattctataatgcatatctttgtaatataagcagcataatatctattgcaaatttttcaagtacatatatttgtccatacacaaggtgctaagacaagattagtaagtggccttgaaatcacattgtttgaagcaattcagaaaaaattatggataccttcaagttcaactactaggcttttacatttcttccagcatgcttatttgtagtgggaggccaaaatctggtcttaaaaaaaaaaaaaaggccagctgcggtggctcacgcctgtaatcccagcacactgggagccgaggtgcatgaattgcctgagctcaggagttcgagaccagcatgaccatcgtgatgaagccccatctgtactaaaaatacaaaaaattagccaggcatggtggcgcacaccagtagtcccagctactcgggaggctgaggcacaagaattgcttgaacccaagaggcggaggttgcaatgagccgagattgagccactacactccggcctgggagacagagtgagactctgtctccaaaaaaaacaaaaacaaaaacaaaaacaaaaaaaacaaaaccacaactttattgagatataattcacatattatgcaattcatcccttaaaagcttataattcagtggttttaatatattcacaaagttgttcaatcatcaacacagccgattttaggacattttcatcaccccaaaagaaacctcacacccattagcagtcattttccattttccatgtactttatagggcctcagtgtctgctgttctttcctgtataggctatacgaagaatgatcaacttgtgctatcctagattattcttattaagcagccacacagtatttgtttctctagggctattatgtgtatgttgtagatattcatttgcattctattacaaaaacatatctgcttggtctcaaataatggcactacatttatttaaagcaatcatcataatggaatatctgaatgcatcactttacttttaaagtgctagcaatttaatttataaacttcttaaacaaaaattcaaagtttgattaggaaactctattgtatgaaaatgttctttgaaaaaatgttcaaaatatagttttctaatagctaacaaatatgttccaaatttggtgtgttaatggtttaaaaagtattcacctaaaaccagtcatcaactccataatactattgttcattttttctataggtaactatcactagcttcctaaaaacttcataaagggcatgttgatacatatctctaactagttatcttagttaacattattattatagagacggctatcttttaagataaagagttattgtgggtttttttcacactaactttcaaagtttcgaagttacacttttattaaaatattcttttgttttcattttacaatagttggcaaagtggaagaaatattcaaaaaaccttcgtttttgttgttctgctctttgaaattatatctgctgatataaattcacagagcaatatcatcttaggaattaaaactgatcaaccattttatgttataaaaatgtattgtcttatttttgttttagatagcaaatttgataatgaagtaaggactcttaaaaatggaatgaaataatttctgttacagatagaactttgcttttttgttatttcttccaacaaattttattattgataaatacttagctgacatttaatgtttcatttaatattaaagtatgataaaagagacaataagttagaaaatcctatagttattattgatctatactaaaacatatagtataggtttgatgtagttaatacatttttggaagcagactaattatattctagttttagtttaaaatgttaaaaatgtgttttatataaacggccttttgtaggaaattctttttgcaaatataaaggccatatctttccttgaaagacctgttgattcagagatgttagccagctatctttactaaaacacttcacaacgctaaaaatagtccacttcagttaaatatggatattttaaaaaagaaaatcccagttagactgcaacagaaggacattttgtgtgacaatattttgcatgattaaaaatttaaacagaataacagctatttatatttacagttacatgagagtaattactaaagcagacaaaatacttagagcataatttaataatgttttcctctagcaaaggtgccaaaattgttatttgcataattttcacaatttgtactgaaacatagctaagtgaaattgggaagacacatccctccgaccaccttttttcttctgtaggagatgtgagaatgagactcatatatcataacaactcatttttgtataattttccataaaaaccatgaccgttgtgtcaaactattaggtgaaagagatgggatccattcatactttctcttttagggtctttatttcaatggccagcctcagcccaacttcaaggctcctaattataacatttaccagttcaaagattaacctcctgagaggggcattctgggctcttggtaacttgatcaggttggtcttctcttggtctctctccctttctggttctttgtatcacaggagggaaatgatggtatctggcacattcctaggatgacttgaagatagcagccttctgtgtttagggctgaaggattgtgaactctgttagctgaaatgccactctagggaggtgaacagaacattaaaaaaagctttagctctaggtagtgtagtgcaagttgagtcaaatttgagagctgggacttgagtggacatttgtccctgccttctaccttaataaaatatgagtgttaactgtggaaaagggcatttgagagatcactaaaaatgaatcattagagtgcccagaagagctttattatgatgtactgtgaataacttcagaacatactctgtacttttatatgtgcttatcaggtaactgagtaacaagtacattcttttatcctgcaccacagagattaagcaatctgctgaattataatggcagaggaatgtacttttctactagggtcagtcagtatcctttagagaattcaatgggagacttaggagaacagagatcctttcttaaatattttaaaattggtaagcaatatatatatatatttcaaatgacaatgaattaaatatatatatatatatatattttttaaacgagaataaccacatttagtgaagaataggctaaaagtgttggaagctttcattctcttctgctataaaggattagactgttccagtcaataaacaaagccattttatggttcctaacgggtaaattgaggggactgatttggtcaaggaccagtatgaggatgtttctgttcaacagttaacaggattcaacatgatatggaaaatacaggcgtgcaaaactatactacgacactcacattgccagctaaagcctaaaacacagccacatttacatatgtgtccatctgtctgtttttacactttatttttccaaccagtgggtgaagtggttttcatccaagctgcagtctgaattttttttttcacccaccactttccattatatcatatagatgcatattttaaagtgcatgttatttgtctctggacgcacatttgcacagccttggctgggttttcctttctcttctggaaggttagctcatctctgcaggcctgtctgctttgcagctgcctgtaccagccaggttgtctcgggatcactgagttagtgagcagtttgttgccttctccaggttgtagaaatctcccatcacaggccagcgtggagctgcagcagccacagtctgggctggccaagccagtgagaatggaagtgctttcggtctcttcagtggagagcctgcgtaaatcctgtgtaaatagagggaggataacaaagaatgagcccctgcagctccgagcatttggagccatttgaggctgaatttgctaaatgctgcttataccgcctgaaaagttgaagagaaaggagcataaaatcccctctttttttccctttctgctcataccccggggggagggtgttcaggaccagggaagcctgaggtaagccgatgaagacttgttttttcagtgcccttttgagtgtgaaaaaggtggcctgggtcactgtcctctctttaatgtcggaaaaccctcacagttagtaaatgttgcatgtaaacgaaagcatttcatctcttctgcttccctccatgctagcgggccatgaactaatcacttgaaaaatcacagaaaaatttcactttaacatgtccggacagttaagcacagcaggagagtaaaagagatcagtaattagcaggtctcactgctggcccctcatcctccccgtgtttctgggtctacagccccctcccctcaactgatctgatgtgaaaaaaaggtaaattgcatgtaggaaaaaatttactttgctgatggtttttggaaagcaagttttgcaaggctgtattctaaagcagaattaagcaaaagcttcttcttcttcttcttcttttttttaatctcatttgaaatcctgatgcaggtttctcagtggggtgccctaaattaaactcctggaaggtagtccctgacaaccgctgaaagaaaataccttttggctcttagtgtgttgtaatcctgttttcaaagtactatatttaagaggaaaagggcataaagaagtgatgacggaaaattagtccataaaataccgtgtgttgcagttccattactacattatacttcatttttaactgtaatgtttctgaataacccaaacaagctgggcagtgggcagttccctctctcctagcactctctcttccctgttggaatagggcagagttgaggtggagggcaccatttctataagcagtgtatgacatgtgtctcacatcatctctgcatatatgcacacagtgaaacactgggtgggtgataacctagtgccgatagggcagggagagtggagggagggaacctaaggcttggtgactactagaagccagggaatctctttcctgggcgctttcttcaaagcagatttgttctcatcaggttctaattaatatatctagaggctcttgatatcaaactgtacatttcactaacatttgagtgtttactctttctcagggcttgggaatcagaaacgcaaaagctcacagacagacaaactagcaaaagctcacagacaaactagtaaacagataaattgcaagaagaaaagtaaataacagaggtaagaacaaactgttgaagaagtagagagcatagcacactagctctgttaatgggagccggggaaagctttatgaaggagattcctttttcactaagttttaaaggttcaataggagtttgctagtaaagaagaatgggaaaggaggaaagaaaaatgaagagaaagggcattcaaggccaacaggaaggattaaaggtatggaatcttgaaagatcccttggctcagaaaagtctttaaaattcagcagatgtttctgcttcaaaatcatatttaatttgagctttagatccacaggaaataatcataagcctgtagataaagggtaggctcatattggatacactcatctgtgcaaaaattatgagatgcttgtttctcggttcatatttaattttaagtgtactgtcatcccgtgtctctctaggacataaatgtgaacatacagggcctctcttttggcatttatttctttagcagagagggcaaatccagaatttagcttcacccttcacatcttcttctcccagcagcttgaggaaaggaatagaggaggtgagcatgggctttggaggacactttctgtgtggcctttgacaagtcatctaatttctttgagtctcagttttcttatctgtagaatggagatggttttattcatttgttgtgaagattaaataaggattggaacatcgcaagtgcccaatggaagttacttgtggtaatgatcataatgaaagtgacaacagtgtggataaagaagagacgggccaggcacagtggctcacgcctgtaatcacagcactttgggaggccgaggtgggcagatcatgaggtcaagacatccagaccatcctggccaacatggtgaaaccccgtctctactaaaaatacaaaaattaactgggcgtggtggcacgcgcctgtaatcctagctactcgggaggctgaagcaggagaatcgcttgaaccagggaggtggaggttgcggtgagccaaggttgcgccactgcactccagcccggcaacagagctagtaggactccatctcaaaaaaaaaaaaaaaaaaaaaaggaggggacggtgttctagagatagagaactggttactgaaaacacctacgaactatagaaatttgcatatgtaaatgtatatatgtatccgactataggcaaaaacattaagttcatctacaaatatatttcaataattgtgcacaaattgaagtattttaaatagtgacaatttaatttacataaatttaggtttaaaatagcatataacacatataagtatctttatattcataagtatacctacttcctggaaatgggttgtctggaagatatcaatattgatatctgtctacctatgtttgtgtatatataaaattagtgaacttacattgtgcaaaatgaaaatgttaatgaatatggtaaatttttattgctacaaaaagagacagaaaaaaagtcttgttcctccagatgagctatcattctttatttccttgacatatattttgtatgaacatatttaactattaaacctggtctagaactagggagaaatgagaattaaataatgtaccacaagttccctaaaagaagtaccagtactgttaaccaaatacatattaatttgtcttatttctctgaagagacatggctgagaggtcagttttaggtgtttgtttgacagtgtgccaaatgtcgcagaagcattattctattatttaaaaagtgactttaaaggatgtgaatatatcgttgtaatcacagttctatgaagtttttaatagtactgcacagtgatgacatcaaagcccatgagatcctacttcatggacagtaggctcaaatattggtagcatctctggactctgagggtcagtccggtgctctccatgtcagagtcttcacttggactgtgttaaaccagttatgaaaattctgagtctcaaatataattaaagctcttgcaggaactggctgacttctggagaagagttagcacatttctatttgaagccaacttggaccaggtctagctcagtcccaaccccagggtcccagaactaatctgttctctgtgcttagaccttttcctatagaatcaagcattgtttggatctgccattgataacagtgttcagacaaggtgatgctttgaaaagtaaaagataatttacagtgttaatgtgagaataccagtggtggtagcactgacttgaagttgccatgcctggactccaatttatccttgaccatgtgtagctgtggcatcttgggcaaggatttaatctcctggcttcagtttcctcaatggtaaatgtcagttttggcagggatggggtaagtagaagaagttggactaggactgtcttggttgttgcaatgtttttctgataagacaaggagaaagaaggccacatccctgtggtatcagactcatcatagcacatcatcactgcttttatcattttttcattccaaatcatgtgcttgatattcaaaataaagatttttggctaaatggaataaagcaatatgccaaaagatgaatctttttgcctggatggttgactttttcctttctttttgagatagggtcttactccgctgcccaggcgagagtgcagtggtgcaatcactgcccactgcagcctcgaactcttgggatcaagccatcctcccacctcaatctgcggtgctcaccaccatgcctggctaattttttgtagagagagggtctcactatgttgcccaggttggtctcaaactcccaagctctagcaatcctcccaaacaggcctctcaaagtgctgggattacaggcatgagccaccatgccaagcctgcctaggtagtttttatgaccatgaattttatgaatgagaattttcttttcttttttttaagctttttttaaatctttttgtaatcccaggtgcacatatattttgtatgaacatatttaactattaagcctggtctagaacttagaatttagaatcaattctagaactagaatttagaatcaatcatctgaggatcctctcatagtgtgccgacgtccttccttgattcagtggatacacaactatggatatggatatttgcctacacccagatgccgatggtatcccaggatttagcttcctgcagttagacactctcattattgctcttttaagtaggtgtatgctggagctacctaccagagcaatgttgtgttctgagcataatctgctcagctaaggaaagcatgcgtgacttccttgagagcataggtgtaaatccagctagagatgctctcaaaatgcttcagagtcttaagacagaaggaggacccagggattagattcaggccttcagacagcaacaaaggaggacagcaaaccaaggggatgttctctgtgctttatggcagtggttctcgagctagagtgggcatcagacccacctgcagggatgattaacagggccccacacctagagtttcagattcagtaggtctcagctaagactgagaatttgcatttctcacaattttttagctagtgccaatgcacagagccaatgttctatagcttctttctttctgtttaacccttactaccagaagactaggatggggatttagaacaccatggctttcccacagtgaataaggcccaggccagattgcagttactcactgtggctgctaacctcattcatgggagtaaagtaggattttaattacctacctgttcctgaggctgcatctcatttcaatttagataatctagtcagtggcttcccaaagccagttaaagcatcagtgatactctgattgcataagcaaacccaaggaattgttgaaattacaaattcctttttcccgccctaggacattttgaatcagtaggtctgggatgaggcctggggacctgtgtttttaacaatctcctctgatcatttaatccacttccgatttatctgtccacaggccttgagtcttcctttccatggtcacacacaatatgtttcactaatgcacatttattttgagtatgtttacccaaaacttagactatgcccttggtcaagggattagcaacctttcaaaagaagcatgcccagtatttctttatatagcctttcatcatcagaggtggcaatgctgatggaatggcctttggtttagctctgcaaaaaagccctgtgggtactcagctcttcaaagaagctctgttcctggcatgtttagaagttactgtgtgcacatacgtaacccactcagctgttccagaggaacaagaccttcaccctttaggtatatagtgtgtgcagttgccccaccgtgggggttggcaaaaagtggggagggcccttgcataagctcattgataagttcagtcatttactcacccaaccaacaatcactggttatgtgttctgagtcaggcatggaggtatcttctcataatcaaaagataagcaagaaacagttaactgcccgcaaggattccacaattttgaatcctaacttcagatgctatctccttacctcatttggcacgtgcatttgtgctggtatacatacctttttcagcacataaactcatttggcacatgtgccaaggattgccaactatcttatacacacaaccacacacacacacacacacatacacagccttaaaacaaaaaaaaaaaaacaccaatatccatgttgagttactaactctagcatcagctgcaaaattttattttaggttgcagttcacgcagttgtctttcaaaaattttcgttatgctgttgttagttctctgtgctggatttggtccacagtccattggaggaaaaaacaattgtatttattgttgtgtttgggagaggaaaattcctctttttatagaggtataaacatatattagtttaaaattttgtgtctagtatgtagtcattaatacaaaactagacacattattgtttataattatttgttacactggatctaaattcaaatattttacatttatatacaacgggttgctttatattaaaatttatgtgatgctcctgtcttctccagtttaagtcagtcatcaaaggatgctcaatctagctatattttttcttgcactaaatatagtgaatcataaagttcgaaggtgttaccagccctctttgcttttaagaaagaaaagatgcactgtggaaatgctgtctctcatttttaaggtcattgattgggttaaaaaggcaaatgacttttttcattgaacttccttcaattaagccattaaccttttaaaataagtgcattcaaaaatctatcaaaaaaagctaaatgagattttaacaaaatcctgacaatttcagcttaaacatatacacagaaaccatatgtgcttagaaagaaatatatacacacaggcattgtttacagagtgtgtttttatatttggaagacactgaaggaagagttattccatacatacattatctgaaatgtacattcagatagcctacatagatttcatattacacacaaagatatctttatccatggtaggtagacagacagactgactgacttcaaacttgcacttgcagtgtggattttttttcctcatctccgggtactgcttttcaaaattgcctcaggctacagaacagcacctcagatccccaaggcccactgcctggctcctaatagccactctccatctgtgtcacatgaacagctgatgagatcgctccagtgtctgtattttggagagcacatccacccaggttaaaatgctagggttgccaaggagcagtcagaagccattagtgtgggtgagaatttgccttgcagcagttccttggcatggtggaaagcgtgtgcacgtgtccctgcacgagcttgggtgtgcgtgtatgtgtgtgtgtctccttgtccaggcgacactccggtgtacatgggtgtgcagggagggtgacagatgaaaactagactgtatattatccagtattgaaagagtcaaatgccttttgtttcactgtatactgattcggtctttgactatatggggtcccttttttcttatcataacagaaggcaaagaaaaagagaacagcaacttcggggtcatgctctagtgtttgggcagatggaagggagctgctttgccttggggcagggtggttgtaatgaagtggcctgtcagtctgtaaatagtgagggtcatctcttccatgtgatggagggtatcgcattgcagtgaaaatggaaatgtcaataaaattaatctgccagctctttgctgtggcttttctgcttctctagtcaaagaaagttgagggttttttggcaagaaaggaaaagaacaggtacagggaagcccacagagcagacccagaagttagaaggcaagtggcccagtgggcaggatggctgtgctgtagcatagtccgagaggagggagcaggtctgggaatgagctgatggatctctagtattcctcagaaagctacagagcatccagctcaggctacattgagcacagagtttattgttttaggctttcttggacaaggtttttacttagcatgggatttatggcatttactgctaatgaatgtctattcttaaattacaaaaacccccatctcagtgcaattcccagatgtccttccaggaccctggcttcttaaacaccagcagggagcataaactctccacttctctgttttcctctttcgtgtggctccaggctaatgatgtgcaaggaaaacacagccatctataaagccccagtgctgtccccgtattcttcatttattttgcatttgattatgccacaagtcggatcttgtttctttcctttttttaaagttattagttcaaatattaatgtagggatatggcatatattgctgctcttgattgatgccttcccaaaaacaggaagacgtgctcgtatgaattttaagaaagtaggggtcctgcaatgccttgccagaagagtttttcagatacataatttagatgccctccaggcaggctttcaaggcatttttgccagagggcaagaaaaaataactatgactgttaaaagtaaatgatttttgctaatgcacaattaatgccagagaaaagcacagaagagaaagatgttgatagaaacttctgattaagtgagcaccctaccttgatgtgtatctttttttttttcatgataatgatcagtggtgcagagagctaaaagttttcatgtcatgcaaatgccgagtgcagggtcatatgagaagtgtgcgaatgtgcgtgcttaggaggtgacagctctaggaggggctgagcaggcagtgcgttatgtgcaacgaacagtgacacagttactgtcacctatgcaggcagcctagaatatatagactacagaacatttaacttgattaccctacagtatgtgttcactctgggcatggggatgcgtttccactgaataggttttctgatggcggttttcccacattggattccataattgacaaagagctactgcactgtgtcaagtgcacagttataattgaattaatgatatgggcaagtgtgagacacacaaaattaacatttgaagaggcctggtttaattttgtcttttacatatttgtgtctccaattatactttaatgaaagagaatatactcgcttaatggatttctttcaacaagcttagctgagctcatcattagctgcacttgttgttggcaccttgcgatgttttctctaatgtatttttatttctttctactaggggatggtttagacaacagtgtagcttcacctggtacaggtgacgatgatgatccggataaggacaaaaaacgccagaagaaaagaggcattttccccaaagtagcaacaaatatcatgagagcatggctcttccagcatctcacagtaagtcaagatgaaagagaaaaaaaaaatagtttttgttgttttgctagcaagttatacggtctcatactgatttttttttaaactaaggtgcctattttcttattcttgaaatctgatgactaacagactagttaaagttttttttttcatcaactattaccatccaaagagcaccctctagaaagtagcaggtttttgttttaagaagctgggaatggactttatttaaaatgatctaagaccctaaacagcatatataagtaaatttgttatttatgctaaaagtatgagagcaacttcggatactgcaacagcaaccaagggaaatggctgtaaggagctcacaaatccataaacgttgctgattacactgttaacgaaagctgtctcctctaggaggccaaaaaaaaaaaaaaaaaagcaccttgccacatgcatgtccaagctcacaatatcaggtgcagctttaattgctgaagcagtttacaaatatgtcatgtatttatatgacaaattcagaagggttataggtgctgtaatgcctttgtttgcaaggtggacattaaagattctttttttagctgctcaagtccattatcttaaaagctaaccatgttcacttctggaaacggttttactatgtgagacattttaaaagtaacaatttatctttatcttcctgtttgcaatccttgtatgtgtggatacatactgttgactctaagactcttatgacaaaaaaattacaatatatttttacagataaactaggcatgcttatattttactgttcatttggaaattctgggaaaccagtaaaaatttcagaggttgcttcttgctataatattgttttcaggccattctatttaggctaatacttaaaaatagagtagcacattgaaagctgaaggtcttctttgattatccaacttgtgtgttgccatgctgaatgacattagttacagtgtcatgggtccaggacaaggttccacttttatttatggtggtggctgctgatgggctcttcttgcagagctacaaagggcaaggggtggagcagtggtggggagggaaaagtgatagattcacattcctaaatcggccattttgatgtaaggacattagtagcaaactaaggtgtatcgatctggcctgtggtgtcaggattagctgggagaaccaatgaggcagctgtggtagtggttattcttgccttgcagctatggccatttcaaaggtcagggccctgcactgactcggctcagaggaattagacagaacatgcggtctctggactgattacttaaccaaagacaaaataatgagtcctaagcaaatactgactaattgaaagggctgtaaatccattacatattggtcagggataatcaggagtatttaatcacttttatctattcaggagcactgaagctgcaacagcaaagccctgaaccttgccatgtggttattattctcatcattatcaaaattacttcacagctgttctttgctacatcacctcagctggagatttactaacctgtaaaatgtttttaatttggaagtcgagtgactgtgaggggaggggtttctcatttttaaatgaaggtttgtttggttagagtagcaactaagaacggcagtgtagctgcggatgacaggccagctgccttctcctgaccagctcacctgtttggttccctccctctgtcctcctccatgcttggtctttcttggtcgaaaataaacacttcaacagctgctttccaagcaaacagctacgtgtgttttcaacctctctgtcatcaaaaccaatgtcagagaacagtagaaccttagagaatgcagctgctctgtttatagatgaggaaacagagacccaaaaagggaagttactagctgaaggtcaagctgagacaagggcccgagacttccaagtccccaactctgtgatttttccacattacaatgactttgccaaaatgacgatcacctttaacagttgcatagaaatctcacagtctccaccatcaatacgctcagagtcacaagggagaaatacggagaagccaagtgctgttttcttttcttgttttgaaagctccgtgttacccaatatagaaagccttaccacctgtattttgtgagttgaatctcacatgggagtgtcaggagcccttaataccttatctcccacctccctgcccagggcggcacccagcatgcaccatggccaccgattagagttgtgggtggctggtgatttctgggcacttgttgtacctctgctgtgctacgaactaacagtaagagcttgtagtcacctcaagaatgctttcatctagttgaatgtatgcaaggctttgtgcagaattctctgtccgactcaaatttttaatgactgcctgtcctccaggttgggagagaggactcaaatagcctaagctgggggagttgggaagtctgcattcatgctctgtgatcctctgtactggctgaacctcagttaagtccattaagttccctggactttctgtttccccatttttcaaatgagagggacacgttgcaggatggataagctcctttcccatgctcctaggttttggttctgctcaaggacatttagtcagagcaatgcccggtcccagcctcatgggtcattctttcctctctttccccctttctctttgcttttgcttttcactaactgctttatttctctcctgaccttcttcacaacatgcccctttcattactttctcccactagctttgtctcccatctttctctctgtgccgctcctctgccttttctgcacctcccttgtagctttaggaaattctcctctgcttgctctttgaaaatgttttccttcttcatccacacttcaccccactgcagagaagaggttcagtaactttgatgaggatggtcctgtaaaacttttactttccaatctttaatgagctgaaagatttactcagctgtaattctgagctcagaaaccaagaatagagacccctaactagcgacatgttaatttagatttcttttcttacatgcactaacaggcatgaggaagtccttggaactagagatgccccactatatttttctgtcatttaattaatttcgactttcaaagtgaaatgttggctctagctcactgaaagtagatgcagtctaaattattatttcatgtaaatttctttacaagtgcatgattcaatatgcatttctccattattagtctctttaacattatttcaaactggtttgttcccttttgtgcagtgtgacctgttcttgtattacaataatccccgatgtacccttttttctttcttttttaaaaaagaagctaattgaattatctcattattttaatttgttaagcaaatgtattttgcatctcaggatgtgttcttaaagaagggggctgccaaggctttgccccctgaatgggccattggcccattttgacattcatgcattcattaactagcagaacataaaagaactctggttgtattttttttttccaaacacccaaccagcgtggagcaacttttcccaataagccacaggggtctttctacatatgttctcaactgcaagctattgtcacctattctgaatacctcaaaaggcccagaggtggaaaaaaacctacctcaacaaaggccaactgtagcaattgttaagtcttagtctcaatatgacaaaaatcattcaccctcagttttcttggaagaacaagttccactccaactgtaacagttaaaacaatctctcaaattcctttgcaccaccaacttcagggggaaaggtaacaaacttgcactaattgattacgctgaggaaaatatttaaacaaagtccaaagtggcatttaaaaaatcaagtgatttgataaaccgtttccatagtcagaattaagcattctgaatttgcttaatctggggctaaatattaataattagcctcaatttttttgtttcgaactaccctattttcaaaatgccccttacaaatatcccctctaaaaaaattcacaataattttaacagaataaatctatctatatatttttagaaattcaactagcaaaaactttctgtataccattaccctcttccgttggttgatggcactgcctaacttctcaagctaagaaatccagtgatgattgaagaaagaatctcttggaaatgtgtgtgcctttgctggaaagtacccaatggcaaaacaaacaaacaaacagacaaaaacttagggaaatcctagagaagtacattccttttgctagcacatggagactatgatatcataaaagtaagcctgccattacaactgtttttatttgacttcaaagataaagaaagaaacagcaagcaataatacccaggctgacgtgaaaaaactcctccacgccaagaagcccttaatgtgctcaattaggccctcgggcacctccacttgccaccttcaagagctcctccagttgtgctgcaaataatatatttgatcatggactagaaacaggaagtgctcatacacaaagacactacttgctcataccagtttctggctgaaggtcttcttatttgaaaacatagggataaagctcacacttagcagatgtgggacttctttcaaagatgtgtgttacagaatcagaagcaaattttacttttaaaagtgatataagccaagtggggaggatcgcttggggctaggagtttgacaccagcctgggcaacataatgagatcccatctctacaaaagaataaaaatttagccgggtgtggtgcacacatgcctgtggtccctgctactcagtaggccaaggtgggaagatcatttgagcccaggagtttgaggctgcagtgagctaggatggaaccactgtactccagcctaagcaacggaatgaaacccagacacacacacacacacacacacacacacacacacacacacacacaaagtgatgtaatattatgtatgcagctgccttgaaactacagattctaaaacctctgccttttgttcatgacaaaatgctttgtcccctcttcatatctctgggggttggggagaggggtgaagcccacctctcaggtgtttactcattttactacttgcctattagaatctgacttatgggattttgtcaaggcctgggtttggtaataaaaatgtgctataaaggatatcatcctacagagacagtgcacccaagttataagtatattcagttccatgtgatgttagagaaacctgtctctccaccgagttcatcaagaccatatgaccgtaaacttagtcatcttaaatttgttattgtaatgtacacacacacacacacacacacacacatatgcaagggaggagagagggagggaaggagaaagagaaacagaaacagagagacttagactattttgccctttgactagttatctttatcttgtgcagatccagatggcttctttcttaaatgaggcagtccaatgtcgaggttaagagcacagggcctggaatctgcaacacagtagatttttgatcttgagccattaccctctctgcgcctcatttttcatatctgcagaagaagaataattctagttccacctggtaaggttattttaaggattaagtgaaataatgtaaagtactcagccctgtgcctgattcttataataagtacatatataaagtaactataatttttattttaatccagttaaatggctagcagaaggctttgaccaatggacctgggcatccaaagttaccacatttgttcctgggattgtagagatgtagagaccaggttttgccaaacaaatcccaaatatggccggtgcagtggcttatgcctttaaccccaacactttgggaggctgaggtgggaggaatgcctgaagctcaggagtttgagaccagcctgggcaacacagcaagaccccatctctataatttttttttaattggctgggcatggtggtgcatgcctgtggtcctggctgcttggcagtatgaggtggagcccaggagtcaaaggctgcatggagccatgatcacggcactgtactccaggctgggtgacaaagtgagaccctgtctcaaagaaaaaataataataataataataatatccaggctgggggcgatgactcacgcctgtaatcctagcactttgggaggccaaggggggtggattgcttgaggccaggagttcaagaccagcctgggcaacatggtgaaacctcgtctctactaaaaatacaaaaattagccaggtgtgtgggcacacatctatagtcccagctactggggaggctgaggcacaagaattgcttgagcccgggaggtagaggttgcagtgagtggagactgtgccactgcactccagcctaaaaaaaagaaaaaaaaatggaaatacccctcagtaggagagaacatggtctacattctgccttccgaaatccatattaacatttggtggctgcttgttgaagctaggtgatagcattagagagtcctggtgtcatgaaagccagagcatcctagtgaactttcagggatggggtggaaggtggagaagaaatgggctatggagtagttcagaatgtctccaatggggctacttttgagagagaatgctctctttcaccatttgtcttccaggatatgaacagaatatagagttgctatcttccttagagtgtgaaagtctaggctgtctgcaagacagcatgttatggtttttattattttttattgattgattgattgtagagacggcatctcgctgtgttgcccaggctggtctcaaactcgtggcctcaactgatcttcccacctcagcctcccagagtgctgggattatgggtgtgaaccacagcacttggccatggtaatggtttttaaaaaagggatcaccagctgtgaacttggaagccttaggtgtgaactctgtgatattattcaacctctctgaacctatttcttaccatcaaaatgaaagttatctgccctatttagctgattgggttgctgtgtggctcaaatgatgcagtcaatttgtaaactgtaacgtgctgcacagatgttaggtattctggtcttctgattgtgtgcttggctttctagctgcttgaagccgctcagagcttatgtatcaccaagggttagagatgtagtgctacccacctctttcatcctgcacccccaatttctccacttgtccatttccacaaatgtatccctggagacactgtgataatttctatcattagacatcttttaaggatcttgaatggttaattgaaccagtatttcatggacattagttatttctgcttggaaattagggccttcatgattctgagactggtctacataatacaaatagctatgagccaaattaataccaaataggaaatgttgaccttagttatacagtaagagatggtctttctcatattcagagctgcaaatgttcacatgcatgcaagtgagtctcctaagaaatacttatgtggaaatgcacatgcagaacacacagctgaaagtaccagcagagagagcttcccacaaacatgcagcatagtggggccgcccctagccttagcctttgcattgttttcctgcttgccaggagaaaacatctgtgaattatttgaatggaatcttatactagagatcgtctgaactggtgtcatctctgtttaatttcaggaaatgatgtcacaatgcattaaattacaatgctgggtgatttattttcccgtggacatgctgtcctaagcattcctcttcttttgcaatgtttccaattaactgtaagcttgagtgttcttcctatttcataatgattttgaggggtggggatgggagataggggtgggcagaagggtaatttcagaggttgctgaggttcagagctaatggcacatccgtcatgtccttattgggatgggagggtgctgagtgctggggctgtgatcagcagtggcaacctgcaacagtattggttagttttaaagaatgtctaaaaatgaaagcctgagtgttctgatgctagctgtccaaagagccaccagataattttaatagtgacctgcatactgtagcttctgcctttatcaaagtttctcttcactcccttcttcagtaaagaatagaggacataagtcaattctgtgtgccatctgttgtcgtttttacaatttctcaaattaaagagacaggccaaaaatttaatgtcgtgttggatcctagaagctcctctagaagagagaaaattgcaactgaatttactttgtctctcttgagggggaaaaattgcatattgctatgtcataaccttttacttgtagtcccaatttggtgttttgaattggattatgagggcttctgcatggaaagactgatgtgtttgggattcagcagcctttgttcacatggttctgagtgacattgtggtaaagttgccagtacagtggtggtgcaatggcttttcatgggggtaatgaaatgcatagtctcctcaatgcaaaaacattttaagacgtttcaagatatttcaaattacatcagacaatcctgtttaaaaagaggttcacctcagatagactgagaaacttacctcccagattatgagctactaactggcagatacattttaaaaataggtaattgataggcagaacacagagtttttagggcagccaaactgctctggatgatactacaatggtggatacgtgtcattatacatttgtccaaacccatagaatgtacaacaccaagagtgatccctaatggaaagtatggactctgggtgattatgatgtgtcaatgtaggttcatcagttgtgacaaatgtgctactccggtagggggtgttgataatggggaggctatacatgtgtggggccagggatttatgggaaatctctgtaccttcctctcagttttgctttgaggaacctaaaactgatctaaaaaaataaagtctacttaaaaaaaaaaggaattgaatgaaaagattgaagaatgaaaggcttattaaattaccatcaaaaagaaaccaaaataattattagctcaaagtttagcacccaatttcataaaatatcactcgaagtataattgtttaaaaatatgttaaagaattcaaggagatggggaattgaggacccttgaataaaggaacatagaaggcatgtgcatattgaatattcagctatttaaaaactccaagaatagagtgccattaaatgctatttagtgaaatccctgaatattcattcagatcatagggaaaatttccatttcttcgttccacatgaccacagtttgcaagtgtattccatggagaagtggagtgattgggaattacagggtaagttgactgggttatgagaatactgactgtccctcagctttgctgcaggatagggtcataaagtgaccctaacattcaagactaatttcgattttagaaagtgttactgcacagatttcagaggactcctggaaatgtcctgccttctccatgctgtagtctgtttttgcaatttggaacagattatgaagtgtaaagatgatatccagccccatttctcctgttaagaaatagtgacttaggtaggaagcattagggtggttgaatggagtttgccttattacatttaggtgctgtgtgccactttctaaattgattggcagcagttgtttacagtatgcagaataatcactggcaccctttaaaggtgtattatcctcttaaaacataatagtaatgccattttcatgcttttacatttgctattcatattctgaactgccaagtcccaaatctgccagaacaaatttaagttgtttttatctaatagtggataagttgtcaagtcacaatataatggcagataatttttcttaaactatagttttacttcttggttataatagataacatgaatatttgttgaatctgacttgattgtccacacacacaaaaattacaactcaagagatattgtcatgggattctgcgatgacaagaaatgaagagaatattattatctagttattctgagcattatagaaaattaacatgggccactaattagtttccttccagccaccactctccccccgccaaatctgctgatatctggtttgcctgacatagccagataatgaagatctcctcttgttaatcccagcatcaaatcttgttgctgctgttaatttaaatacctctgttatcacattataatataactgtctagattttatttgacttcttgcatcattctcctgcaatcacaaatattccagaattaattttgtcttggaaatatttggcaattctataataatttggaaaagtatattcccatgactcaggccacactagaattggaaaatggcttttttcttacccagaatacatggtgtgatcccatcgtacgctgacaaaaaacaacccaagtgtaccggggtggtgctacactagtcttttaaaaagaaaaaggcttttatcaatagaaaagatgaatgctagattattccctgtagatttggtgacacattgggactctctttaaaagcaaccttattttttttccccatggtgaaaagttataggttctatttcagtgtttcaagatacctgcaggcagctcatgagttgctatacttgttttaaacccttcctcacagtgattttttttttaaagtagtaagagaacatgggaacatggggtcattattattcaattataggctcagtttttctgttagtttctgtgaagccataaatttagaactgtgtagcaaaatctcatggattacctgatggcactttgataaaaacccctcttagagcttagacctgaaggttttatgttttctagtaaaacacttaaatgtaattaaatatgatcgtgtgaaaaggcattagtttttaatatgacctttgttgtcagtctggaaatcctctaaaatttttgattttttttttttttttgcagagcaagtttgacagaaaaatgatttcatgctctttggtccttatgtacttgtacccgtttgtccatggctattccaaatacccccatgcttatttaaaatgtatatataatcagttacataaaaagaggtatgcttaaattctcatgactctatggttggacctctgtggttggagcagacaatagaaatgtctgtaattcatttaaaaaaaaaagtgactttcctacctttagatagtgaggacaatctgttaactctttgtgttgataaaagcaaacatttcagggcacggtgaaagaaatctctaccatgtataaggttatatatataccagaagcagtggagttaggaccaaattaagatttgaccagtgtcctagtcttagcacagccttttgctccctggattattttgagcaagttatttaatttatctgagtgctcgttttcttacctcattgttttgagggttagctaagattagaaatagccttctgagaaggacaaaatactgtgcaagtgtaaactggtgtctattaatgttttcatataatccattgaaatagtttgctctgtcatagctccatgaaacctgaacttggatgtgagtgacacactcttcaaagacaagtattgcacttgtttcttttgccctaagtctggaatggggatcaaatcctacacatagcacatgtgcaagagaaaggcaaaagacctgacagaccattcatatgtggcagcatgagtcaaagtaacttttggaatttgtacactcaaacttaagagaaagaactggaagactgcaaactaacttcacaataaacgtattgtcacttgtgttattacagctttggagcaagctggttggggctttgggcatctttgttctttgttcctaaactcttcatcctgagaattaactgtccatcagcatgccatttttcatcctggtcaagctggtggagaagaattgttttacatctctaaatggcgatctcataggcccattccaaggaaggcaaagtctggtactagacagaattgtctcattgcagcaagtgataagtggaattttatttttcccctgaagacagtttcaatctggatgcttaatcaggctttctttgattctacatacagagatttcagatgttacagctcagttagacgaaagcacagaatatgaatgggagaagagtgaggaaagcttctaaaggtatatagaggccttaggtttagacgcaccagccagatatccaggtggatgaacttctgtggaagctgaaaatggtggcactatagtttgagagttggagctaatctttgtagaggtaatacttgaaaccatggcactgaataaaggttaaaataagagacagtgcagagagagaacggggtttgagtctttttgaagactatatgtgaagaggtggagaaagaaagtagtgagcagagataaagacatcagaccagtaggagcataatcagatcatgtgaagaggaaaggagtttcaaagtagaggaagtggattctgtagaaagatcaaggacaggacaggcgcagtggctcacacctgtaatcccagcactttgggaggccgaggcgggtggatcacctgacatcaggagttcaagaccaacctggccaacatagtgaaactccatctctactaaaaatacaaaaattagctgggtgcctataatcccagctaatcgggaggctgaggccggagaattgcttgaaccctgggggcggaggttgcagtgagctgagtgccactgcactccagcctgggcaacaaaacaaaactccatcaaaaaaaaaaaaaaaaaaaaaagagagagaaaaggaggccagtgaagatggggaccaaagcacacctgggaaggtactaagaaacaaacattttgtaaagatagcaagaaagctgagggaggtcaggaaaaagcttctcttcacttatgactaggaactgtggcgagggtgatggagagtgaattaggaaggcacggaaatgcagacttggagcaaaaagggccgggctgaatggactctctccacatcatctcatcctttctcaggcagtctcagcaccaaagagcaagagggactaaagcagacaacaggaaaaacctaagggtgagatcaacaaggggaggagagggaagatgttagagcagtttttgaaatgacagaccagtaagtaagaattccaatgagataatctttcctgggacagaaaaataatcctacagttcatgtgaataataaaacaactaagaaaagtcaagatatttttggaaaagaaaaatgagggagcttgtgcactgagaattactaaaatgtatcataaagctacatgacgtggcactggctgacacaataggcacaatgatcatttgaacaaaataggaattcacaaatcaacccaaatatagaaagaaatttactaattttaaaggcatcacttcaagtcagttgagaaaaaaatcatcagtagtcttcatcaaaatatacatttaagagttttttgaagtagacatgactatttctctttccttcgtttaatgaaatgttttgagagtaaaagcaaaggaattataaagaaaaactgtgatagattaaattacatacatttgaaaattaagagcttttgaatgccaagaaaacagcatatacaaaataaagaaaaacactaaactagcaaaaatatgtaacattatataacaggcaaaggattagtgtccctaataaataaagcattgtacaaatcagtaagaaaaaaattgaagcaggctgggcacagtggaccacgcctgtaatcccagcactttgggaggccgaggagggtgtatcacgaggtcaagagttcaagaccagcctggccaagatggtgaaaccccgtctctactaaaaatacaaaaattagccgggtgttctggcaggcgcctgtagtcccagctactcgggaggctgaggcaggagaattgcttgaattgcttgaattgctccctcctgggagacgaggttgcagtgagctgagcttgcgccactgcactccaacctgggcgacagagcaagactctgtctcaaaaaaaagaaaaaacaatgaagtgaataaaaagtcaaaagatgaataggtccattcacaaaagctgaaatacaaatgactggtaagcatttaaaaaatgttcagcattggcctggtgtggtggctcatgcctgtaatcccagcactttgggagacagaggtgggaggatctcttgagttcaggatttcaagaccagcctggggaacatagtgacactccatctctacaaaaaaataaaaataagttaaataaattagctgggtgtgctggtgtgcacctttagttccagccacttgtgaggccaaggttgggaccaaataaatttaaaaatcaacaacaagagatttttatttggtggaaactgagaataaaaaattataatatctggcactgtccagggtagaaggaaatatctaacttaataatgactataaaagttgacatggtctttctggaatataaactagtaatatgtgttaaaaaaagaaaacaactaaaaattttctcttctttgatctagtaattccatttctaggagtttgtcatgaagaaataattctaaaagtacacaaaaattatgcaaaattatgtataaagatatttattataataaaaaattgaaagtcacctatattctcaaatgtaggagatatggaatgttatggagcgttatggactactgtgtaaccattaaaaattatattccaaaagtattttgagataaggggaaatctctatgtgttgctaggcaaagtaaaccgggtaaggcagtatttatgatataattttaattttattagagaaaatatatatggacatatgcacagaacatatgaatgattatccttgggtagggagatctaggtgacatttttactttttatattagaaagtttctatgtaatgtgtattgcattgataatacagaataataaattttattttaataaagaaccatgttggctaagggggagaaataaagtgtggtaacacactgggaacactggaaacccaccaaggggttgcaagtccaggtgcagaataagagagagaaacagagaagcagagaaagaacatttttaggtttgtaatcttggaggtgcaacatctctgtttgatgaattttctgctgataaagtagagatggataacattggaaatgagacaggcaagatattagacaggcctttgtcatacatattggagttttcaaaagtaggggcaagccatgggatggagaactttctagcatgtacataagtcgtaggggaaagagggagtggcttaaaagtcaacattcttctctcaacaactgtgaagaggaaagaaagcaaatgctgtgagcttcatgagaaaagtggctggaaagtcttaggtaggggctgggagcaggcaataagggaagaaagggaagagagaacagtctagtttcttgtccttaattccagaggtactggtaaggaggaaaaatgaataattttagtagaagagtatattagttagctagggctgccataacaaaataccatagcctgggtggcttaaacaacagacatttattttctcacagttctggaggctggaaagtccaagagccaggtgcagcagggttattgttgggtgagggctctctcctggtttgcagacagccaccttctccctgtccctgcataacatttcctctgacttcatttaaccttaattacctcctaaaagccctatctccaaataggtatcatatggaggctggggtttcaacacacaaaatttgggaggacttaattcagttcagagcagagtttttagcttaacaatattttaggacaaacataagtttaaaaaaaaatcaaggatatggaattatgtgtatggaaaagttcaaaggtttatgggtttttttttcccccataacacagccagtgaggatgagggcaacgaggcaagttaatttaggttgtggtgagattaaaaaaaaaaaaaaagaccagaatgccaagagtaatgccattaggattacaggtctttgctagacccaggcactaataaagctctctaaaatactatcttatcttggagtagagaacctgagataaagatccctcaaatgtttcctcaaagcacctggatggaggcaggaaagaggagcaaagaaggcgtggggaggactattcggttggctaaaataagccacaaattgagttcttattttgattatgtgtaaggtttgtttgatctagctgcttttccttagagttcagttttacatatgcttcggcgcccaaccagcttgtgtattttcaggatttttttcctctctttcttttccttctttggttgggttttagatcagggagggtaaggactgagggaagcgaggtcagcagacgagactcatttcccggtttgtcagactgtgctcttgacccctcctcaggacctgtgattaatacacgctttgtagaggagacttggcaaaccccgctctccacaggacccgattcataattcacagcgagcaggaggagcagggtctttgtggtggcttgttggctctttgctgcacaaaaagcaatgccttctgaccttcgctgttatctaatcaggaagtagacagtcctggcgtgtagctgagtcctcgtagggctctctacaactgtaaattatgttcgagctccccggatctggggcatgccacactttacattactattgtgtatcttaaaataaacagcatcgcaagctgtttattttggtgttactatgtatgcaattttaaaacagtggttacttaaacaaatgtctctgttcccacagcacttgaaagccagtgcttgctcctgtggttttggattttgtcacttctgtttggattatatttgaaatccacactgtgagcagttggaatgaacctggcagcacctaagaccagggcctgctgttgggccctgcgtttcaccatgtgcagctctcttcctccccacactatgctctccctaccctctacgggccatatgcatgtgcacaaaccagatattttgctttctctttggggctctaaatttatccccatgagtgatctagagagtcatttactttaagttcctgaatgctttgcaatttaattgaagaagtggtgtcgtcatgattctatagcaaaatactactcccaaatactcatttaaattgtcatctgtgcactacagatacaatgcatattccattgacatagcttggtgaagatgaatgagaaagcacaggggtggtagacaaaaagaatgtaaaaatatcaaagttttgacagtgacttgccccatgaccttcagttcttatgcctcttctacacaaggggtgaaacagaaaggtagaaattcttagtagctcatgcaatacttgtgctcagatcgactttggtttgattcacaggaggctacttactagtgctgtttatttggatgagttatttaacatctttaactcttcatctgtaaaatgggtcagattgtcagggtggggtggaactgaaaaaaatagaatatgtaaaacagtctatctctcttgaacaaggttggtactcaataattactttttctcttctcattccaaccctcaccccatgacataaattatagctgcgggtggtctgggactagtcctcttggcttgaagctggagttaatgtagtgtgggaccatcaatgaccgacctggcctgctgggtgatgtttgggactgtcattacccagagtatgtttaaccattagcgatggggccacagcactccagacttctccattccctggcctgtttttaaggagagaagcagaggctaattggaagttttgtattatgtgtgccttaccccctgccattagtggagttatcaaattataatcatctttccatcttgatgtcatgagtttcttctgttgtactggtacattataagggaattttttcttttatttgcttgtttatgaatgaatgggtagaaatctacttggattcttaggtatttcaagaagtctaaattctagtggtaaaattcattgcctttaatactcggactccaaatcagcttacacaataataatttttgttctcataactcagttatataaatgaaataatttgttttgcatgtatagatactatttacattttccacaaaaaccaacactactttaaaaattgtatattataagcctgatagattgaagttgcataatataataaatctaaaacattgatgagatgatgtgggtcttactggctagattgccacgtttctccttcttctgaagcacatgcgcaaggtcctatgctgtaaagaagtgaagacattccttggatcatttagatgccggcaaggtccagtaattgtttcttattgctctctatgattccatgaagattaacatgtaaaatattttgagcatatggattttttattccacatataaagaaaatattcagtgatcatagagtgactgaaagcttggatggagcttcaatatctcttattagctgagctgtcttgcacaagttatttaacttgttaacagtctccatttcttatctttgtaaaatagggataatgataatacttcctcctagggttgttaggatggacaaaggagataatgatgggccaggcacttaccacattgcctgcattaaatactgggggaggttggctcttaatcactatgttggccctttaaggggacaaatacttttaaatttccctaataatttggaaggtaaaataaattcaaaatttttggtgtcattgtttcacctctgtcctaaacaccatagaatcccattttgcttgacggaacacaaaagaggggtgtgagatagaaataaatgaaggaataaaaagaggacttgtactgttgctaggtgatctccattttcactcagagtgagagtgcatcctgtcctccttccctgctgtggttggtctatctcttagttagcggtatttttctttttttagtctgcttattacctttctcataatgagatataatcaggcacttttttgtgtgtgaggccggttcttgctctgttgcctaggctggagtgcagtggcaccatcatagctcgctgcacttctgggctcaagcgatctttgcacctcagccttccaagtagctgggactacaggcatgacccaccatacccagttcacttctaaatgttttactcttagtagagacagggtcttgctgtgttggccaggctggtctcgaatccctgggctcaagcggatcctctgacttcagcctcccaaagtgcagggattacagggatgagccaccaaccccgcccacactctgtgtagacgattattctttctccacaattatagccatttcgtctcctttaccatgttctctttgactttctggtttgactgcattttcattcttcctcatttttttaacctcctatgtgtcactcgtgtttgatgttcaaacaattttattattttctatcggtttgcgtcatcagaaacaggtcaaaatccttattacaaagagattggaggggaatgtacttttttgccctaataaaactagatggcatagtgacaagtgtgtgtttgttaaaaagcagttagcacaaattagaaatacttcacagcagatgtgttttgtgaaaggatatgctaaaaaattaaacagagaatactttccggttataattttagaaaaatattgtgcaatgaagcaaatttacaattcacttaaatcaacctttttatagagtgtgtgccttcacgataaaattttgacaattctgcaatttgtttcagtgtttcattgagggggtggaaatccatctgctagttattttgggggacaccattgcatcaataaaatgattcctaagctgtacacagacttcattttaaattaatgtgtagctgttttataatgtgtagctgttttaagtataagtgacttagttaaaggcaaaagttcctattatatgcataatagtaggaatttcttttttctttctgtcaaacacaatcccagggtactctactctctaagaacatcttgggccctgggttctggcagacgtttcttattcttacttcactgatcccttttcgagctgctggagggacttttttttaagttgctaccgttgatacagttgctattaatcaccgtctgccatgttgtgacgcaggtttaataacatctcattgagtggctctcgcaaactggaggcttaccaacagcactagcctttgatattcgactcacaccaggaaaaagaaaatgtagagttaaaaaaaaaaaacactgcaaatagaaaaaagaacaaaaactggagaaaacagagtgaaatcaaaaacagatagctttctgtgtgcagcttagtttgccatgggagcagtgaagctataaatctcagcagtgttgtttgaaaactgaacatgaggctgctaaatttatcattcattctttgttgtttcagggaggggaagagctagctgacttggctaactttggattctgccccctcccatcagtaacgtttcatttttctccaaataaaatcaaaatttgttttttcctggatcaaagaatactgggtgatttttaccaatggttggggaaagaagggggaaaggaggactggctttgagtcatccatgtgctgtgggagtgtgtgatttcttccacttcataaatgtggggacaggatggttttctttcgttatagaaagaaaggatatacacatctcctactatatactttaaaaatccatatgtagaatgtaaaagcatggagaaagttcaccaccacgaggatatctagagcctcgtgaagctgcaaaattccctccttttgtttgcactggtgctctatgttgcactgcacagggggaaaaaaaaggtagaaagcaagcctgctacagatgtgactagctatgaatattcatgagtgccattgctcctcctttcctagagcatccaggcctttctgatcttcctcttgcacagctcccagatgctccccctgccacccaccccacacttcccccacctcaaatctgccctccctgaccaaccctggaacaagactgcagtttatttcgataacatcctggcatgatacagtgatcggtggccttagaagtgtgtttgtgtgtgtgtgtgcatgtgtgtgtgtgtggatatactcctgcaccaaaacaaagggggaaaagaaaaaaaatgtaattatctacagttttatgaattcaactccccttaatgttcattatttaaaccagcagcaattacaagttcaaaggggtttagagggccagcaacccgcataatcactgccaaattaagcgggactcattcgtcacaggagagtacaccctgagcagtgaatcatgcatgccgtgacaggctctgatttacataaagcagaaatctgtgccctctggggctgcacgttacttcttctcagtagccctgtgatacgtgaattttcttttggtattaggaagctgatactgcctccgacatggcatagcgttccgctaaatattgacaatagcttttcactttagtgtatacttgagctcaagtcacatgttgggccacaatgtcagtgcaattctgattctgggaaagaaaagaatttgtttcccctaaagtttctgaattaagtacttttatgattaaaaagaatgagagtttggtggtacagttgtgtttccttttatcccaatctgttcaggtccatagttaaaaatctatggtgctgataaggagcaaaaaaaaaaaaaaacccttagacctatgacctaagtgcctgaagggagtgatccgttgaggaatgccccctaaggccctttcctgtttggcatttagagaacttttgagtgttacctagtgacagttggagacgataattgaagtaacctgtgctctgaagctggactttgtgttaccaaacttgagaggacttctgattggatggtccaggaaacctgcctgagtgccgtcatcagccattgaaatctcttgggtctaaacaataaaaaattccagaattaagttcaaatcaaaatgcatttggtttaggatgattgtgtcagacaccaaaacaacatatgtagatttttatcccccattcttagatgttctctcttgtctctttaggcaaaccttggcactattttatcagttgttttctctcttttgggaagagctcatttttccatttgtggctcaatcatcttggtgttatgatgtcatttccccacacagtcattctcttttctcagatatagtactgcatccacacttaggattggaagcatttgggctttgagaattagtttggcaatttgggagataatcgacccttgtttttgtgctgactttgaagtgcagataaaggtcttgtggttttgtgtcttgtaactgggtctacgcttcacatatatctaagcagtgggtttaagaagttctttgcaatagatcacagtagtttgtgaagcaatgtgacaaaatggacccaaagcacccttaaacaggcttcctggtgttctgctattgttaacattctaccaccaccactcaaagcctccaaaatttcatcttgccattaagtctctagatactttgtttccctgggttcttgcccatatcttcctccctgagattcttcaccaagtggagattttgtatgctcaagtgtgaagttacagaaatgttgtctctactgtcacaagtatactgtaaggtggcctgcttatactggaaagaggagtaagccaggaatatcagtcccaggttagtccagttaagaaaccaggttaaatggacaagttgtttcacctctctgagcttcagtttcttcagttgtaaaatgggtatagtcatttctattttgcttaacccagaagttgttataaggagtggtagttgttaattttatttcattgccaaagctctgaattcattgagctgtttgagttcctcctagaatatatatatgtattatatatatatgtaatatattagcaatattatatatatatataatttttttttttgagttggagttttgctcttgttgcccaggctggagtacaaaggcgtgacctcggctgactgcaatctctgcctcctgggttcaagtgattctcctgcctcagtctctggagtagctgggattacaggcgcccaccaccatgcccagctaattttttgtatgtttagtagagacggggtttcaccatgttggtcaggctagtcttgaacttctgacttcaggtgatccatccacctcggcctcctaaagtgctgggattacaggtgtgagccacggtgcctggccttaaaatcatcttttttcctctcctctcttctgctcttctgtgttcctcagaagtaagatcctttctctctcgtttcttcaggccttattctcacatccaggctgagctttgctgtaaggtgccatctggcactctcagtggaaggattctcctggactccatgaaatcttccaagccagtttcctttctctcatcactacctctagagtcctagggaagaagaatcaacattttgacttgcgttcttgtgtggtcccctcctccagaactcatccttctttttttctgtttaaataatttcatgccttttaaaacccaaatactgtcaagcttttagggtcactgagattgaaatatgcatttgcaggaggtaaacattggtagacaaatttatatactgtaatatatacctaaagtgccaaaaaaagccacattgaaaaaatattattctaacctttcatatgtacacctgaaaaatatagtcaatgacttgcaaatccaaattagatttatagtaaattatttaaagatattctaataaagaatttaatgtaattgaatttgtacacattagggcaatcttaactagcatgctggcaaaaatggccatatagtagtaccctaggtagcatattgatattacaaatatatgtaaaataggccgtatatagatgcacacacatgcatgtatacacacaaacaagcaaagtgtggtaaggtagaacctatgcaaaataggggaagaattgtaacattttctcagtgaaattcatgggacctttttgtgggcacacgtcacctgtggactactttgtaacaggcctatgaataggatgcatgattagattctgaggttcagttagtgataaaaacggaagcatgctttctttgcaaacaaatagtgcatctcttcattcacttctttcttagcaatctatggtttctaacatggccataccactgggaaaggactgaggaacaaggagatgttttaatgatcaaatttcacctgctttggtccagcctctataaaatcttgctgctatattgaaccaaagtacccatcaatgttccttttattggacatgcttcatatattgtgatgagattatatgcatccgtagaggttgttaggaaaaacttaacatgccactgatgtgcaatgaaggaaagttaattgtgttgatgccacaaaactgcatcaatgagtagatccctctgtcaggagtgttaatctgtcttgaataaaaactgctacacaggtttgtaaccaatagcctaaggtaaaacctggtattaataaacatatggcaatgaatcaagccacaactatctttattcacatagggatctatggactgtaaaaccaccaccgggcgcagtgcctcacacctgtaatcccagcactttaggagactgaggtgggcagatcacgaggtcaggagttccagactagcctgaccaacatgatgaaaccccatctctactaaaaatacaaaaattagccaggtgtggtggtacacgcctgtaatcccagctactcaggaggctgagacaaaagaattgcttgaacctgggaggcagaggttgcagtgagccgagatcaggccactgcactccagcctgggtgacagaatgagactccatctcaaaaaaaaaaaaaaaaaaaaaaaaaaaaaaccactgatagatgctggtctgtaaacataatcttttttcatattgctcacagaatttaagtcaaatgcagctactgacaacgcacatgtctctttttcagtttctatcatattatcagtaatacacactttcattaatcaagaaagctaattcttttggactctgcatctatatacatttgtatcttaataaagaacttcatttttctattttgaaatgtctgcgtataattaactatcctggaaaatttcaactatcttggacttatatccaagcaactcttatataattcaactgcatctgaaattggtcatcattgaaggtgacaaattgggaaatgaataagatttgcatgactgaattttgtgtggagacaagagataactactttgaaaagttacgtatctaaatttagtaagtgagcttttactctgtgtgatataatatccctaacccaaaatatacttacatacagagctatttacatgtgttcatctggaggacggtctatagactacatgacatttcaggtacattccagttcaataaatctttccctgtcatgtcttcgtaaggagcaatagactattgttttgtttcatttggagaacagtggctaaacctgaagctaaatacagagagatgggcaaaaggagatatgataagaatgacggtgtttgtgaacttggacctgatttgtcttatgctccctaaatcattttgggtgcaattaatattgtgaattagacatttttcttgggtgagggaagtagagatgtgaatgtgagtttggaaggagcaagagataaagctagatcagcaataaatccaccctcaacccccattcaattaagttttaaaattcattttaaacagctgatctgaataacgctaaggagctttggagattcatctaaaacagtgcttttggccgggtgccgtggctcaaacctgcaatcccagcactggcggaggccgatgggggtggattgcttgagcccaggagttcgagggccagcctgagcaatatggtgaaaccctctgtctaccaaaaaaaattaggaaggcatggtggcatgcgtctgtagtcccagttactccagaggcttaggggtgaggatctcttgagcccaggaggcacaggttgcagtgagccaagatcatgtcactgcactccagcctggggtacagagggagaccctgtctgaaaacaaagaaataggccgggcgtggtggctcatgcctgtaatctcagcactttgggaggccaagatgggcggatcatgaggtcaggagatccagaccatcctggctaacatggtgaaaccccgtctctactaaaaatacaaaaaattagccaggtgtggtggtgggtgcctgtagtcccagctactcgggaggctgaggcaggagaatggcgtgaacccaggatgcagagcttgcagtgagccgagatcgcgccactgcactccagcctgggcaacagaacaagattctgtctcaaaacaaaacaaaacaaaacaaaaaaaacccacagtgctttccaggattatttttcaggctgtgaaaagcatgggttagaacacatcaaatggggtgtgtctcccttacctccattaactgtaaggacattaattcaatgttcttattcatttattcacttattctgcttttattgaacaaccactaaatacattaggtgctagtttaactgatttagttttttaattcatatccatatttactctgtgtatctatgtagacacatgttagaattgtcaacattcatttatattttttgtacccaaatcaatttttttcagaccctccttttcaatctccagatccttgtcaatagcagactgaagaagtgaagaaatctttaaattttccaaggataattttgtgaagtatcagagagactaggaagcaagtttctagaatactttttccaaattgaatgacttcataatatttgaagcgtaattcttcattgccataaactcactccaaaggatatattttaaaacactttcattgtcttaatagacacaatcttttgtgtaaatgtttctccagccagtattttcccatttacacaacacttaggtatcctagcagtgctaaaataaacattggcttcagcttaacaggacaaatgtttgcactctggaattgtttgtcaatgaaataaatatttccaacccaaaacaaaacaaacctgaaccccaaatgtattaatgtgaagatgagaccaaatttatattgggtttatgctcaagttgacatcttatttttttttattttttatttttttttgagacggagtctcgctctgtcgcccaggctggagtgcagtggcgcgatctcggctcactgcaagctccgcctcccaggttcatgccattctcttgcctcagcctcccgagtagctgggactataggcgcccgccaccacgcctggttaattttttgtatttttagtagagacagggtttcaccgtgttagccaggatggtctctatctcctgaccttgtgatctgcccgcctcggcctcccaaagtgctgggattacaggcgtaagccaccacgcctgacccttattttaattcttatggtcacagagaccatacttttatgggttatcttaaggaattcaatcaatggaaaaaagtgataatttaagaggggggagatatgtttactggtttagggttccattctgctttattctcagcctgaaaattctcctttatacctaaatatgtgcagcacaaaatgtcgtttcttatgtttgttcctataatgcgttctggcacttatgtgatgcttcacttaaaaatacttagctctttctttttccccccaaatcaataactttaatgcctgctccaaataagctaaaatagttttgataattttctagcaaatggcaaacttttaccttttagcagttaaaaactttctgaaatatttaaaaatcactttgacagtatattaaagtgagtgaaagtctttatctaaagatcccactcaacttttcgtgtacttaaaatattataggaaaattgaggaggtgacttattatagaaataagaagacttaaatgaataaattttctgaaaggaaagtgactcttgtgaaagatctcaaatggcagacttcattttgtgttttatctttgctggcttttactcacctacactcatttacaaatccatgaaaatggttcaaaggtcattggtgaaacttgagaacaaatgcaaaacttccaactatgggaaataggtagaaatacattttaaaaacattgggtttattaaattgggttgattttattactaatttataaatcagtcaaaaatgtaacgccaagttcattgtcctagagcgaatataactatagttagcaagccagctagataatctgtaggcagttggtgattaaactaaaaataatctagtggaaaaaaattgaaatattctttaaacattctttcattgaccggctatattcaggataatggtagcattaaaatgaatacttttctactgtttaattctctgcgttcgatttaacatttttaaaaaggtatccttattgatagcagacgtttcagcctacccttgtatttcttacatgaagaggagaatgttaggttttaaaatcattaagttttgctatatattgaaaagttgttttctagaggtctgcagacctcttgcagacaacattattctaggtgttagcatactgatgaaacatcaaggatatttatcaaaaataccaactgcctctttattaacatagcaaaggcttatggacattaatcttagatggcgtttttaaaattgaagttttaaagaatcagaatgaggaacagagaattttctaaatcagtggtccccaagtgtgtattcacaaaaaggtgatgggaagctgtgttagttagaatgtttttgccttaaaataacagaaaaatatttcacaaactggcttaaaggatagtgaggaagttccaaggtgtgtggtatggtggactccaagagtcagtggttcagtcatgtccccagagacccagggtgtctctgctgctctttgttcacatgccggcaccaccctcagggagggtttctgcatagttgtaacatgactgccagggctacaggccactttattcaggtccaagtggcttcttgtgaattctctttttctttctttcttatttatttatttatttattgagatgggaccttgctatgttgcgcagactggtcttgaacccctggcttccattgatcctcccacctccgcctcctggatagctgagattacagctgtgctctaatatacctggctggatctcttttgagagctaggcttcccagaagcctctagcaaaagtcttttcatgtgggccagaagttggtcacactggcaaggaaatcggattgccctcagacaaattggacccatccttaaagttggaaggatgctcaaaagaggtttaattccttactgtcagccttatacactgttattattctcatttcacatgttaagcaagtacataatgcccagagagattaaatatattcgtctagacttactcagctagtaaaaggtggcagacgatcctacaacctcggctatcagtgtaagacacacagatttagtcttttcatatatatttaacaatttccaaccccttccttctaaaaaagatacattcaaaactgggtctggcctggaaagagtacatgaagcagtacatgttttcatgaagctacaacagaatggctttaaaaacttagccaacaggagtttgtttttacttttattcaggcatttaacatggttattggcttatccatgaagaagcaagttaagtttttgtcaggtgaacaacgaacagttctgcatctctagtgagctacgtcagttgtaagagggaagatttttgaggaaaaaatttcattggcactagccctagtgattaagagacgcatatagctatcaaatatttgtgagtagagaacagggacaagataggtaatgaaggaaggagtgatttaaagtagacttgcatagattgaaggtgaacaatatagtttatagaccatggatcaagctgtgatggagaagatataaggtcacacccctgaaagtgttagaaaagctgacatcttaatttctccagataatagaaattgtaaccatttgcataaagtgaaattaatttatatggttacgatacccaaacattctgtatccttcagagggaaagagatactgccaggccatggcttaatttgggaattatttatagctaattatctttacttctgtcaacagtttaatgattttttatggtatgaaaaacagtagcaatgctgaatcactatcaaaagtcagcattcaaaaaattaaataaatggaaaaatcagtggtccaaatagtgcaaaaaaaatgtgtattatgcacaggcaagatttatttgtttcagagtttatgtaaacaaatacttagaacaagggaagaagattataagtaattgtataacaataaaaatgattcagtactccacctcccaaaggatctttaagtgctttacagaaccccccatttcattgagagatgtgtaatagattcattcacttacatacgtagaaataacttgtcatgccgttaaattcctcttctataggaatcaaattagtgttgggaactcattgtcaaaagttacatcatgggcccagtggcgtacacctgtaatcccaggactttgggaagccaaggagggcggatgacttgagctcagaagtttgagaccagcctgggcaacatgacaacgcctcctctctacaaaaaaaatacaaaaattaggtggacatggtggtgcacatctgtagtccaagcaacttgggaggctgagaggcggaggatctcttgagcccggaggctgcagtgagcagagatcacgctactgcactcagcctggttgacagagggagaccttatctcaaaaaaaaaagttccatcatgatgggtaggactggcctacagaatgcagtaaactagttagtaaataatgtctggatggtggtgcgtcagcaggaatggtactgtgacatgctggtccctggagggaggtgttgctgccaccacacctgaaagctttgagctcctcagaggattcactggagacctagattgttccattcgtgctttcagttaagtcaactgagcaactgactccctgctgaagtcccactgttcacttttctcatattcgttttttatcatcttactctttctcctaaaaatgtcctttgacttttctaatcagctttatatttcattacgaacttacagaaaaactcactttcaccaggagtggctggataacatcatggtgagggcatgcgttaatgaacatgacttctttcacagtgtgctcatgtagccatgatgttgaaaaggcaagttaaataagcttttgatagtagatgtttcaacatggtttttatgaattggaattttttagaacatcaggtaaaatcaaccagaggctccaacatgactttctctgccccataatcttttttcttgtgtttttaaaattggtatatcataattgtacatatttgggggaagtacatgtggtattttggtacatgcatacaatgtgttaggatcaaatcaggataattgggatatccatcacctcaaacatttatcttttctttgtgttgggaacatgcctcataatcttgattgtaacactagattataatcttgatggaacattatctgccatgtagtgttttgttggctgatgtggctcaaagcctaccaaggcatgatcttagtgttatgcaagggatcctgctgggctttgtctgaccaagtctgggtcttgttctggaatctccatgggtactatcagtctgcggtatcaagagtgctaatgacaggccttgaggcagagatgtggacgtgtacaaagagcaagcagctcaatctgaagcacatggggcacatggggcatgctgacacgtgtaacagaatcatctattgaggccatttccagttctattattctgtgagtctatgacgtttcctgacatcatagaagattattttccttttcctggagaattggctgataatgcctacagcaatgaagggcctcacctgctcaggctgttttgtgcttgaacatcacagttgaaatttattgctagaattctgattctagcactgtattcaagatggcagcacttattagcagagaattatcaagttcacgtgctctctgagcaagaaaagcccttagttatcctaagattttggtatagataattatttctcttgagtacaggaagagcacttcataacctgtttaaaagtatttttttccctgtttttagctttggaatggtaagtagaaactgctaggcatgaccaacaattaaagtcatccagtagttgtggaggcccaaaagccaacctgagatttctcatgtcagttaaggaaattttaattgctcatttacatttcatctcagtcatttttggctgctgtaacaaaataccataaactattcagtttataaacaacagacatttatttctcacagtcctggaggctgggaagtccaagatgatggtgctggcaaattcagtgtctggtgacggcttacttcccggtgtagagacagccgtctcaatatgtcctcatatggcagaaggggtgagggagctctccagggtctcttttataaaggcactaatcccatttgtgagagctccatcctcatgacctaatcacctactggaaggccccacttcctaatatcctcacattgggggttagaatttcaacccccaaatatgaatttgggaaagacagaaacattcagtctatagcacactgtatcatggggaacaatattttaggaagaaatttggagaaagaagaagatttcaaaagtcaggaccacttcttagtacataaaatggcctgttgatattagtaagaactactaatttctcactaatggctacagcaagtgtcatatggagtccaacatgttcgtatctaagtgacagaactcttgccttttattgattttttttttactttgccttccctctcttctaaatttaaaaaaaatcaaaatgtatgaagtctaaaatattgacaattttaaaacagaaaatttagccagtggtgtttttgttgttgttgttgttgttgtttaccctggaagacttattcatatcatatttgagcaaaagtgagtgtctgatgaatgcaaagctttcagctttctgagaagtattttctggagtatcacacagagtctatggcagagtctatggcccagtgaaatcagaatgtgcaggtccatttaggctagagggagggtctctgctaaaagggcagaataatcagagggtgtttctgtctcactgtgcagcaggttggtttgctctgggctccctctgtgggtgccaaactaaatgctcaaggctgtcctgcagctgtggtcagtcattcaaggaaaaatctttgtggaggtaagtgagccctccaggagacatggttttatagactttccatattacttaggtattgggaggatggctctgataaaaacagtgcacttaataaatttaaaaataaaacaaattttgttgtagcactgtcttcttagaaatcttccaattgaaagcaaataaaataaaaagaataaaaactttagttttcactccaaacagcctcctttcctgtgcaactatataatggaaatacttcattacatctatttcattgtctcgtttaaatgaaagtaaatgtaagaaaaagtgggccaagatgtgaaatatacgaagctccttcacccccttcattaatccctaccactaaaatacagatgaattattaagaaaaaaatgctactagatgaggaaactaatcaaaatcacttaaaccaaaatgttgcctgaccgtatattcatttattcaccaatatttagtggtctttattttccttctgcgggcaagtacttcactaagtgaaaggaggatgcaaagatgagtcagaacccagcctgccctcaagaaatttaaacacatgtaggagagataaaatgtgaatatgtaacataaattaaaagtaaaaagtgaaaagtgtcaaaagaaaactatgggtacagggctatgggagttggaggaaggaaagattacttccagctgaagaaattagtagatgttttaaggaggctgcagaagcggggaggaggagggagaactttgaaggcaggtgatggggtgggggtgggggctggagccagcaggacggtgcagggaatgtatgggaagcagtgattagcaggcattgcttccatcaaggctgagataaggctgcctgagcaacaggaaatgatgttgggagggcaggtctattcagactagagaccacattggttaaggatttcagatataattgggtggagaatgagtttttgagcaagaaacagacagaatattgttataattcagaacaattagtttggaaaagtttaatcagatgggttgaaatgccaaaaaaaatgagatagaatactcattacaaggcttttgtgtaataaaaataagtgtttcacaaagtacggatgatgtacggtttgtggcacgtatggcaaatctaagtgctattcagattttaataataacataggtttaagtacatatttaaaaatataatttgtatatcgaacctcttattctataaactattgccatggatgaatctaaagaaaacaatgtaggtcaagtaaatttaaaatattaaataaataatatagtgcatgtgatctgcccatatttcccaaatcttgaaggccttaggggaatgactaaaggttgcaaaagcctgatctaagtgtaagctaatgagtttctaccttagggcaatggaaatggaagtgaggagataagtatgagaaatagtctggaggaagaatctgcatattctggcaatctaagtgtggtgaacagggaaagagggggaagcaatccaacatactgctagggttttgggcctgactatattagaatgccagtaactattcaaataaataaaacaggagtaggtttatgagaaaatgagagtccagtatatgagcatgtaccaggcatttgaaatgcagaactaaagggctggagtaggaagagatttagaatcagcctctgattctcaagggtccaaggtagtagctgaagtggtgagattgttactgaggactctagagaagagggccaaggatagatccttgggaaagtatacttaggaatggcagcagctagagaggcccaagaagatactagagaactaagaagataagtgagaaaatacttcttctcttagtcatgaaagattacttgaagcctgagcccccagtatagccctgtgattggcatcaggtagttgctaaataaatgttaatgcaaaagaaatgcataatcaacagatcaaggtcgacagagaagggtgaggggaccaaagggagaaaataccaatgaatttggtcgtgaggaagtcattggtgacctttcggtctgtagagtctcagtggagtgacaagggcagaagccagattgcaagaagggaaggacagagtggggggtccggaagtggacttttctttcaagacctgtgaaaatagagaggatcctagcttgggagggggcagggagcggagctgagaaaagttgcttgttttttgcttctcttcttttaaagaatacggtatgctcatgcacgtttgtaaacaagaagaaaggatctggtagaagtgaagagattgaaaattcaagggatgggagaatatgggcaaattgatgggaaaaataagtgggggaaaatcaaaggcacacataggaagaatagccttggcaacgtggaagaatggctctttctctgacagtgggtgggagtaaatacaattagcgatacgaagaggagaaaaaaaggggaagctcattttgactttggttatttcatttaagtagtaagatcatcttcaagtagtatcaagactggggtttgctccttgggaaacatgaaaagcttggccattttcagtgtaggggttgtggttgcagaaagatgaagagtaaatcttctcactgcagttgaggctggcaagcttgggtaatggtggtaaagagacctccagtccttattaggatgtaaagaccttattttctatttagcttagttcaaataccatcaagcagacagtgaaggaagtagagtggctcctaaaagcagcagccctaatcttctgtttctcaaaaaacctctttgtagtcattcttaattatgaccttgtgatacataggtcctattaattgattcaaccaattgagacactgaggcctaaagaaattattggctataataatgaggtgattgccttagctatcacgccagatttgctcttttgttttctcctgatattttaaactcttccttgctggaatattaataactcaaagataaaaagggtacaacttgtttccatgtgggaggtaggaagaacattgcttttggagtcagttctaggcctggtgactctttgacttgccagttgtgtgccatgatcactccaagcatccattttctcatgtgtaaaaagcatgttaaaaattttaaatgaggagtttaaaaattacactcccagtaggcttactatgaggactaaaataaataaaagtgtgaaatgcagtgccaagcacataatagctgctcaataaatggaagctaaattattttccacagttatctttcaaatttcactttgatcagttttcacagactatcttctaagcaaattctgtaggtgtttgccttcggaaaagtgcgtttgttgtcagtgaatggttacagggaaaaggagatacttgtcatgcagctggaaacatgaaaacttggccctgtgttcttaaaaatgaaaactccctgcaggatgggtcaagttgctaccataggctggagcctatgattctcagagcagcatcactcttaatggcactgttctgcatgcccttaccttgctcattttgctgggctcagtactaattttcatcccctaggcaggcaaactaagtgtcattgtggcagttccttccatactaagaggaagcattgatcactaagagtcagcatggtttactatgagtaaattaaaccagacctatcttgacctctgacaaggttgtcgtgatgaccatgtcagtttggttccttgctgtatgcccagtgtctgacactgatcctagcatatagtagacactctatatattaaataaatgagccaacaatgtccttgtgagcataatgaaaaattactggccagtgagagtttcgttggatggctttgtaatgaaagacagcacaaagagattgctagcacctgagctcaattggctttgtcttcaggccagttatacgcaattattttcaaaatgatgaattgattgaggacactgataactctacctgaagatgaagaaagagccaacgtgttaaatgtcagaaacagaatccaaagaaatcctaagaaagagcacagaagaatggcaagaactagtcatgtatagttagaatgcttaagatttgaatcttggtttcagccagcacttggagtgtgaccatcagcaatttgcttaatcttccaggcttagtttcatcaactaagttaggaggggaatctctacctcacagggctcttgcatgaatgaaacgtttggcgtaatacggaagccctcagagcagtacgcttcaagcagtttatgaagtccttagcgtctttcttatggccgaaaatagtttggaatgggttgaaacaatgggccaacctaaccagatgaaactgtaaagaagataaatgtaaagagtgtttaagtaccataatttaattatacaaatataagacaggagctatgtaacagaggagagattttagctgacagtaagcatggaatgatttggaagaaaaagaaaagccttagccaggcactggggctcatgtctgtaatctcagcactttgggaggctgaggtggaaggatcacttgagtccatgagtttgagaccagcctgagcaacagagcgagaccccatctctacaaaaagtaaaagaattagcctggtgtggtggtgtgcacctcttttcccagctgcttgggaggctgaggtgggaggatgtggaggctgcagtgagctgtgattgcaccactgtactccagcctaggtgacaaaggaagaccaaaaaaaaaaaaaaaaaaaaaaaaactttgtgtttttacgacaatatatccagaatggtaaaagtcgtagtctgtgctgatcaaactggctttaaactatggtaccatttatgggatccacctttaaggaggacatgaacaacctatagcccgtcgtgaggaaaatggcctgaaggaagagtgcatgctcgaactgaagaagagaacatctaaagggacagtacagtgtccttaagtgtttgaaggatttccatgtggaagaaagcaactgggcttgctctgtgatatgacaggggatagggcaaggatcagtgaaggtgcagggccacaggtttcagcctgacctcggtcagcactttgtaagcaccagtaaactgaatgtggaatgaactgcctgtgcaggtggtatgcttcatcttcctaaatttgcttaaaccatgcacgtttgtaccttggcacctgtggtaaagagagaaatcaaggccgggcacggtggctcatgcctgtaatcccagctctttgggaggccaaagcggacagatcactaggtcaggagatcgagaccatcctggctaacacggcgaaaccccgtctttagtaaaaatacaaaaaaaattagccaggcgtggtggcaggtgcctgtagtcccagctactccaaggcaggagaatggcgtgaacccagaagatggagcttgcagtgagccgagatcgcgccaatgcagtccagcctgggcaacagagcaagattctgtctcaaaaaaaaaaaaaaagagagagagagagaaatcaagaattggctaagatactgaattatgtattatccatgggcccttccaaccctgtgacactgggatttcctttccctttcctaactcaaagttagcaaaatgttcattctttctcaaaaaaggtggaaagcagttcagtttgagggcagacaataaaaattaacccagaaaaataaagagcttgtcagcccagtgtgtttgtttgttggttttgctttaaaaaagccattagctgagtttcattcttaactttaatcagattctctgattaagaattccttaaacactccacaaagtaagcaatctttcctctcacatctggcaatttttgtaaagagagcaacatgctcaaggcatagctcgaaatagaacctatatttcccgacttctaaatccctgagctattcctatacaatgctttttaccctgaacttttcagaggctgtttgaattcacccttccagcccttgagggcttccctttcagtgattcacagctctgtttgacatccagttttggaaaggttagaggacttgacaagtaaaacctctcagagtaaatggtaaggggaggcctgaatgcaagtatgtaatatggagagttactcccatttctggttaagaaatggtgattcttatttttagctgggaagacaatgggacaaaatcatgcagtttaggtcttggcctttaatcataaggctggtcagccctcagctcttaagccagcatagaagttatgagacagtcaggtcatcctcagaggttccatttccgttccatctgctccatgtctcttgtttactgattccattttgggccatgatatttgacctactaagaaagaaacagtgccttcttggaggaaatcttggaagttttgcagatccctttaaattccttgactttactctgaagaaacacgtaattatgatgagacttcattattgctaaacaacaatatacagcagcagaaattcaagcagtgtttgtattcaaatctgccactaagaacaaatttccattattaattttcccaatctcgataaaaaaaataggggaggaggaacagtttgactagtggcagctctgcaaattgtcaccaggagccattggttccctgaggctgatgactgccccaaagctgccccacattcttccagtgtgaacacctagagctgttgaaaagaattgagacgcttgtcaacagaatggaaagctggccttcatcaaaacaattttagtctgtgagactaatgacctttcattgctgtttgttttagtttggaactaaatgagaaaattgtcttagataacagtagcttggttttcctttaccaattattttattgggaaaacctaagtagcataattattcaccaatatttaaaaatatatatatatatatgtgtgtgtatatatatatgtgtgtgtgtgtgtatatatatacacatatgtatatatatatacatatatatatatatatatatatatatatatatatatatatatatatctcagactagaggaaatggttaactagcccagaagtctgagaaacctaacttcagaatggataatgaaaaataataatacaaagattcaagtcgaacaagaaaaatgcctattgtgtgctcacttaccgcaatagttcctcatgataaagcacaacatttctgagtgctacttacctctaggttttttttctttctttctttctttctttcttttcttttctttgtttttttttttttttttttttttttagtagctgtaaactgagctagctgatgaactgcctctagggacaggataggatcacccttgtttcctgttcagccttgctgaagaaaaaaaaaaaccctaatgaaagaaaagaacgtaatggctttgccattaatccaggtaaaaggtttaggagagttcagagatcaattaatttttaaatcttagatcactaaatttcttttttgaagaacaaataaatttctggcttgtaagacttacaaacctgcaaatcaaaatgtaagtaaaaacaagagatgttcaatcaggaatgtactggagaaagtaaaagttaggtggttttcatttatctaggcactttcatagttcatttgaagtggcatgcaattagaaaaaaaaagtgcatggatatggccttccttggttaagtgtctatgggtgggaatgcatgaaaatgtttaaagtgtttaagtaaaaatatcaaatagactttacataaaaccgccagataatttacagacatttgcagtattgaccatttcccttcagccatatatcagggaggagaacagagacgtttgttgcatcgttgggaagcaatgaaatttctgtaagttgtgatccactggcatgtaataactcgatctgcttcatgcagacaaaatatattaaaagtatggacgagtgaagtttgtgccccagggaaaaggcgagataatgcattgaaattgttcagaggtagttagatgcctaatggtctcatatgtgagctatgtgaggtctgaggtctggttctcataaattctggctagactgatcctgtaatttcaagcaaaggataaaagcgttagccagaatcatcagtgttcaacgtccatgatggtggatattattcatgtaaagatttttaaaagaaaaaacgcactttaaaagggatgctgtggaatataattcatggttctatgtatttgcatgtttgtgcttgaaaataaatgcacacctacatgcacagtataagccatttaatgaaataaattaacttggaatttatataaacctttcacatcttttccatgatgggataggatttttgatataatataataatgtgctgcatgaaaaaccatgtaggatctaattatttcaacttcaaactgacatatctgtgtttaaattggagtaaaaaacatgtttgtaataaaaatttaccattacgaaaggaataatttaaaaccaatttggacggattcaggagtgattagagggaaaagttcccaagacatttggtagtcttataaatgatttcacaaaatatgctaagactatccgaccaattatattggctgaatactgaatcctcagatttgaaaagaaaattccttaagaactaggcttttgaaattaggtatatggtgggtatgaaaacccttgataacttcctcctttatgtaatttatttcatcatgggggtagaagttttgaagttttcctttgcagtttcttttctttttttaaccagctcacttatgtttgagtctacagtatatttatacagtctttcctgccagaatcgttgacagtatttttaaatgctttcccttgctgcctaggttataccaagcaccactctcctcaagttctcaaaactataccacccacacacacatcatgaatagagatgtgcatactttttttttcttttggaaaacaaagcgttcaatctaaaattactttggctttattgaccctgaaaatcatctcaacttcacaccttatggaggtagctggtttgagcttctgtttgatcctggtaacaagactatcattgtaagattttgttcgtaaaaatgtctacatttatatatatgtaatctctctctattagtaccataatttaaagcactctgacattctgtaagaacctcagtagaaggtaccttttgggctaaaaatcttttgcttcagtcttctgaatttacctgaagacatttgtagattcagttataatggattacatgagtttgacttttaagattgctgaaaatgcttaaccccaaactgttgtgcctgatagtgcagcacatacacacagcctttatattttaatatacaaatattttctgttagggatctaggaggtgatattccttatttacaaatgaggtaaccagtctcaaagattaagacgagcttaaaattatccttaaaaaccatcagattgcaaactttgcatcattcctctgatagttatcttttggttgaaaaacaaatgcttccattttattttcttcaccttgaagaaatatactaagagatccatctaccatttagaatataaaggacaattataagaaatgatatgatgccccaggagactttgacaagtggattaatactttttttaaatgaaagtacagtagaagaattagttaaataccggaattctagaagtttctttttgcctcatttaaatatttataaaatagaaaaagattctagaattaaactctcatgggtttctttccaatcatatgaaaggaaatccaggtaataattcacttacctctggtttttaataattttattggtgtgctcatccttccagaactcctcctactacctattcattgacattttgctgccgttttttgaagataaaatgactgtgtaacaatcctcagctacagataatttaaaagaattagtggtggaatcagggtatttaacttttcattatttgttctccattaggaagactcatagttttagcaggaagggtaagtattagaaatttgggattcgtttatgttttctatccaaagttaggtaatatgattaccttttgattatttcaattctaaatatctcaaggcaaaattcaaaatccgtgcgagaaaacctgagtagattcctctcatcgccccccttctctccccctcttcctcattctccaaatcctttccagattgtttgcaaaatgaaattatctaatttcacgagtatttgctctgagaaactactacactctctggtagaaaaaactcaaagacccagtttcaaggcctaatatcttaagataagatctttttgtccatgaaataacaccctagattcgatgagagaaccatgtgggccaagttttcccaaatatatctatgaactagcatgttgacaacaccatttacagtaaatgacaatgagatcttttagaaaacactgtatgctaataattttattatttctttcaacaatttatatcaccaaattaaactctagcaagaatttattcaggatgttttaatattcattgaggcactatttcaaaatgtacatctgcttgcttaattacaatatttctgaatttgtaacacttgtcactattacatttagtcttaaaaaaactttagcaactgatgctgaattattaatttcaacattatgaacttttcaacttctaagtattgaggaagaaatactaagctaatttgactaattaatctagttgattatagtatatttatccaagcagagttaatctggcagaccaaaaagtttaaggagcctctggtaaaactataaatgaagccgactagcaattcagtgactaaacaagttattcgattgaaaattaacactttaggccgggcgcggtggctcaccgcctgtaatcccagcactttgggaggccgaggcgggcggatcacgaggtcaggagatcgagaccatcctggctaaaacggtgaaaccccgtctctactaaaaatacaaaaaattagccgggcgtagtggcaggcgcctgtagtcccagctacttgggaggctgaggcaggagaatggcgtgaacccgggaggcggagcttgcagtgagccgagatcccgccactgcactccagcctgggcgacagagcgagactccgtctcaaaaaaaaaaaaaaaaaaaaaagaaaaaaaaaaagaaaattaacactttaatatgtacttttaatcatcttagattaaagagtgtagcctgatagctttaagagttaatactttgtacttgccttatatttctaatgctcacaaagcatcctagactatagcataattaaaaattttacttccaactatttttacactgcaaaagtatgcctagatcaaagcattttgtatttattttcttcaggctctctcactgcattataccatcaaccttattaagttagtgtaccctatgaagatgcatgagagaaataagctctcatttgtttaaatatcccacctacaataatgtaggtgatgacagaattagtgaaaatgggaactccttttgctttgtgacagaaaccacatttaataggcctaattttagatgtagtcactgattctgtcccatgataaaagaataagatgtggaatgtgccaaacagaacttctaaaggtatatgttaaatcaaagagtgttcctttgagtttgcacaaaaaaaaaaaagagagaaaaatctcattgattttacagaagaattaagggaaaatatcactctatggattgcttgatgtgagggaattctagagcattttgctttagtctgatgcttagtagacaagtcccctgagtaggaagcatggctaattctgtactttaaagtgcctaatgtggtgttgacatactcaaatgttaaataatatattttaacatgaagggaaagctcagagctttcatgaggtaaagctgaaaaatagttatacatgcccttgactcacagaaaataaagaggcaaaagctcacattcatttattcatttcaggaaaaagcctaatagtcttgtgtttagcacattttggatttacatttcctagattttcagaggttcaaatcctccctcagaagaaaatttatctaatagctctcaatatcagtcttttttttttcctgaaaagccctatccccctttctggcactcacacttgaaattattgtactaaaaatgttaagtttttgcttctttttaaaatctacaatatacttaagtacatcaaatcgtgcactttaaattggtccattgtatgttatgtgaattacatcttaaagctgtaaaaaaaaaagaaagcccactaaactataccaataaactgtatatacttagtgccttctttcatctttcttttttgactagttcttttgataggtaaaaattcaaaccaaaataataatttcaaataaaatgtttccagatatgccaaaaggaagtactttgaaaatgatttaagtgaacaagagactccattcacagcttagtcactcaaaattatcatttattttaatagtaacaaatttataatttccacactagctctattggctgatttaatattagacaaagttttttttttttctgcagattcaacaaagtgtggattcacttactcattgaatcaatacatttaaactttaaatcaaactgttttctttggggagtgtgtacaaaaataactgcttccaggccgggcgcggtggctcatgcctgtaatcccagcactttgggaggccgaggtgggcgggtcacgaggtcaggagatcaagaccatcctggctaacatggtgaaaccctgtctctactaaaaatacaaaaaatttagctgggcgtggtggcgggcgcctgtagtcccagctacttgggaggctgaggcaggagaatggcatgaacccgggaggcggagcttgcagttagccgagattgtgccactgcactccagcctgggcgacagagtgagactctgtctcaaaaaacaaacaaacaaacaaacaaacaaaactgcttccaaatgaagatacaatgcccccacttcaagtgacctacagcctaatggggactaccaacaagtaagctggcatgttgctacactgtacttacactacagaaacaactgtcatgtaatggtcaacaaacatctggcaactgccaaataagtgctggtaaaccaacaattaagctattccattatgtgaaatgtggcacatagttctgtaaacatgagttagcccgtagtaatagaagtgcagtatcactgctagagttgtaatagtagctatatttatgtgattggaccaatgttaacattcattttcaaagagaagatctcagggaagagttttgatggcttgggagaagtaaaggaaccttgggcagagaccatatctgggcctaaggcagttgtagtccgagctgaccctgtgtgactagaagtccacacgagtatgcaagggaattgaagctgaaagaagaagtcctgaaggcaaatattactaccctcccaagccgaacctacaccaaacctaaacctcttgtattttcaaacgcgaatactgtcatgagcatataaatgacagagttaggtcacttgcatgataaggtggcagctgggcagtggcagtgcaagcagaaatcccactgggctgaaaatttacaggaaaaccatgagctttagtttggttcttcctccaaattgtctaactggtcacttaacctctctagttctgtcctgacttgttaactctcaaagaacatgactctttgtgtttagcatgttttctgatggttaatgagtcagcaaatgaaggaaatgtcaagcactgaagataagaagaaatattattttaatggtggtgttttgaagtctgacagttaaaggattaattaaagatgtgtttatagaagctggctgtctttgtaatcactggtggatctcaatatctacaaaacaggaccccatccttttttcttgctagccttttttcatttcttaatgcaagattttcctctgtatgttactttcgtgtcttgttccatgcagaagggataagatgatctagtaataagtaagttttggttatattataaaagataatgaattaaccctcttaaaatgcttcagaaattcttagatgaatgcaaattattgtttgggggaactgccaaatcttgaacatctcattgaattgaagagacagaaaagagttatcttcctatgaaagaatggttgatggttattgttttaagatatttccatagctaatgggtatttattgtaaatttctgctttaataaatcttttccttctttctacaaatccactatgtaatgacttatgcagtgtgccttaaggtattctatcctgggccaaggcaaactattttcctcaggactgttatctattataacaagtaaagtcatagcaattgtctagagaggacccttgtaagaaataacaatatttttgctgtctgaagggtttatcaagccaagtgacaggaatgtcagctaacattcattgtctctgaactcgtatttggaatacaattaagaaatagataaacaaggaaaacatactgatttggggttccccaaaggataaagtttcctcccctcaaaaaagaatctgatgtgactcatttggataataataagtatttggcctttaaaaaaagctttattatatacaaggtatatgacatgatgttttgatacacatatatatagtgattagtgcagtcaagcaaattgttatatccatcatctcatatagttgcctttcttttcttatttttgctttgtttttgtggtaagagaacctcaaatctactcctggcaaatttccagtatacaatccaacatgattaactatagtcctcattagatctctagactttttcatcctgcataactgcaactctgtggcatttttaagagtctaaaatgttgttccagtgacatgaatgagcatttctaaagtaaaatattatacctatcaaaaattgtaaaagagctgaaccaaaattttgtatagatctgatgttcaatgcaaacagtattctcaacattgaaactgagtgttacgtcttctttgatttaatcccagtggtcagtttggtgactgaatcaagtgtttaaaaaaaaaaaaaactggtcatagctgagattcatttagatcagatgaagatgatccctgtgaacagaaaaggaactaagggactttcagcccctcagctgacatgccttttctttgccatcaaagtgttatgatgttattaagtgtcttatgatagagttggtctcattttcagtgaccatttatttagccagttcattttatcataatttcaccccagcccatgaaagacactgctcttcttaagaactccaacctgattctgacttccctttgaaaagtttacaaccagtgtcatttcaccccaagaagggcttgctgcaggtaaaatttctaagttttagaagtttacctttgaaatctacaatttttttttttttttttttttttgagacagggtcttgctccgttgcccacactggagtgcagaggcacaatcttggctcactgcaacctctgcataccaggttcaaatgatcctcttgccttagcctcccaagtagctgcgactacaggcatgtaccaccaagcctggctaatttttgtactttttgtagagacagggttttgccatgttgcccaggctcatctcaaactcctggatttgagtgatccacccgccttggcctcccaaagttctgggattatagctgtgagccgtggcacctgaccatctcccatttccttgtgtgtactctctaccacacacaccccaccccacactgagtgatctggcagtactgtagtccagaaagttttattttcttatctaaatcttggggtacacactttaccatcatcaagcatatctccaagcataccttccacacaccccttggcctggcttcctgaaatgtttatgctcacagatattttgtgaaagcatcctgtgtaatagttacagtccagtcagaaaacagaaatcacactagttattttcacagagagcattcaacataggcatttggtgaaagggacattagtaatcttaaaaagcaaaacagaacacaatggaaacaagataacgcttttgaaagccgttaccttctctagggctgagaggacaaaaggaaaaggtgggggtcagcagatcctagaaggccagaggaggagccttgtggagttgggactcggtcctctgagaaaggaagccacccagctagtgctgggattgatacctcaggagctgggcctcagatctctgaggagagaactgccagactacttgtgatacccgtgagagtaatgaagttgactctgggagcactgaaggaagctggaagccggaaccaactgtgtagctgccagagtaaagtaccattgctgaggcaatgtgggtggaacattaagagcacaggaaggagcaagttctttttccctcctcctgccttccagtcttcctctagtgctccctaattgcagtgtctaacaggaagcctggggcaaaggcgaaatgcagtttgtagtatcccagtttcagcatctgaaagcagagtactaaagagaaagttcggagctgaaagactttggctaaataaaggctaacctggatgctacagctgaatacagaaggcaagattatgtttaactagggagaggtatgaaacctaagattacaaaagtggttaatttttgctaatgaaaaggaggacttgatcatcccccaaataaaattatgtgaaaacctaggtcaacaagaaccatatcaaaattgatctgactagcagtttccagtataatttatctctcaatgcccatgaaaacacaagaaataataaaaaattacagtggcgctagaaactaataccaatagaatctgggagaaataggtcctatttataaggcatgtagagcttccactcatagcataccatacctctttattgaataaaagaattagtatggtgagaggtaagaatatgcttcacaactctgtcaccatctgcctgctgacctagtgaaccaggaattgtgccaaccagaaatctgagcagaaacccctctctggctcttgggaactgctttgagagattatcattttcccgacacttcaactgtgacctttctataacaaacagatattgaaattctcaggaagcaaatgaacagaaagtagggggatgttaacagtggtgcagggcattctaataaatacaatccttataagaaagccagtgtgggaagtgggacatagaagggaaaaaatattggcagtgcggactgtgaatttcagttttctaagtgctacatctaatcagaataaagcaaataacacacctgaggatgctccaattcaagatccagaaaagatcatcagaatactgtattacaagaaaacaaggcctctatcagaaggcaaaaatatgaaatagaaagtaaaatgatgaggtaaaggacagaagaagataaaaagcaaacagaagaagatgaaagaagattgtaaggaagctaaaggcacaagagcaagattaaaatactcattgagaacagtcaagaacagaactgatcctgtagaaaatcagaacgtgatggaagaagacatttgaataaatctcccatgatggtccagagaaggatagaaagatagaaagaaaaggagaaggaaagtgatgatatgaacaacagagaatggaggaccaacagataggtattcttacttaagaaagatcaagtacaaataaaataaaagtgatagtcaagagtataagagggaaaaaaatcacaaattctctcaactgaagaaaaataatagaaaagttcaattaaactaagggtaggttttttgaaaaggaacaaaattgacaaaccttcagctagactaagaaaagactcaagtaaataaaattataagtgaaagaggagacattgcaactgataccacagaaatacaaaagattataagagactgctatgagcaattttgtgccaataaattaaataacctaaaagaaagagatgaattcctagaaacatataacctaccaagagtgaaccatgaagaggtagaaaacctgaacagacaaataaccggtaaggagattgaatcagtcattaaaaacttctgaacaagaaaagtctaggacctaagggcttcactggtgaattctagtaaacacttaaggaagaattaacaccagtccttctcaaacttttgcaaaaaatggaagagaagggaacacttccaaactcatcttatgaagtcaacattaccctgataccaaagccagacaaggaaattgcaagaaaaaaattacaagctaatatgcctggtgaacacagatgcaaaaatccctcagtaaaatacaaatagtctaaattgaacagcacattgaaaggatcacatcctgatcaagtgggatttatccttggcatgcaaggatggttcaacacatgtaaatcaataaatgtgacatacaacattaacagaatgaagaataaaaatcatatgatcatctcagtagataaagaagaagtatttgaaggaacatatgttgacataataaaggccatatatgacaagcttatagctaacataatactcaacagtgaaaagttaaaagcttttcctccaagattagggcaagacaagaaactcactcccaccacttctattcaacctagtactggaaatcttagccagagcaattaggcaagaaaaagaaataaaagagattcaaatcaaaaagaaagaagtaaaaatttctctgtagatgacataatcttatatgtacaaaacttgtgatcttatatatcgaaaacaccaccaagaaacttttagaactagtaaacaaattcagtaaagttgcagaatgcaaaatcaacatacaaaaatcagttgtgtttctatatattaacaaggaacagagaaagaaattaagaaaacaatcccatagcatctaaaacaattaaatacttaggaaaaaaataaaccaagtaggcaaaggatctgtacactaaaaaactgtagaacatggatgaaagaagttgacaaaatcacaaataaatgggaagatatactgtgttcatggattggaagtattaatattgttaaaatgtccatactacctaaagcaatccatggattcattgcaatccttatcaaaattccaatgttatttttcttagaaatagaaaaaacaatcctaaaattatatggtaccacaaaagattccaaatagccaaagcaatatggagcaagaagaacaaagctggagccaccatattgactgttttaaaaatatactacaaagctatagtaatcaaaacagtataatactggcacaaaaacagacatatagactaatgaaatagaatagagaacctagaaataaatctatgcacttacagtcaattaatcctcaacaagggtgcaagaacacacaatgaggaaaatatagtgtcttcaataaatggtgttgcaaaaactgaactccagatgcacaaaagtgaaattgaactatgtctcataacatatacaaaaagcagctaaaaatgaattaaatacttaaacattagagctgaaactgtaaaactactagaagaaaagatagggaaagatctttttgacattggtctggacaatgatttttttggatatgactccaaaacataaggaccaaaagcaaaaatagacagatggaattgcatcaaactaaacaggttctgtatagcaaaggaaacaatcaacagagtgaatatacagcctataggaattggagaaaatatctgcaaaccacacagctgatgagataatatccgaagtgtttaaggaactcaaacaactcaatagcaagaaaacacataacccaatagaaaaatgggcaaaaactggaatagacatttttccaaagaagacatacaaatggccaattggtatatgaaaaaattctcagtgtcactaatcatcaggcaaatgtaaatcaaaaccacaatgagatactacctcacacctgttaggacagctattatcaaaagagaagagttaagggatgacaaagatgtggagaaaagggagccctgacacaatgttggtgggaatgtaaattggtatagccattatggaaaatagtatgaaggttcctcagaaaaattaaaaatagaactatcatgtgatacagcaatctcatttctgggaatatatccaaaggaaatgaaatcagtatgtcaaagaaatatctgcattcccatgttcattgcagcattattcacaatggccaagatgtggaatcaaactaagtatctattgacagatgaataaagaaaatgattgtacatacaaacttacaatgtgtgtattaatcagcactaaaaaagaagaaaatcctgtcatttgtgacaacatggatgaagctggaagacattatgctaggtgaaataagccaagtacagaaaaacaaatattgcatggtctcatatgtggatactaaaagagttaaactcctagaagcagagggtagattagtgattgccatgggctgggagaaatgggtacaatgtttcagttatgctgaatgagtaagtttggagatctaatgtacagcatggtaactgtagttagtaatcctgtattgtacacttgaaattcactaagagagtatgtatcagtcaggattctccagagaaacagaaccaataggatatagagagatatatatataggaggaaatttattgtgtgaattggcttgtgcagttatggaggctgagaagccccatgatataccatctgcaagttggagaaacaggaaagtgatggcataattcagttcaattccaaaggccggagaaccaggggagcccatggtgtaactcccagttcaacatgtaaggcctgagaactggaacttgggggttttgggggattggtgtaagtcttggagtttgaaggcccaagaatcagcagttctgatatacaaggtcaggagaaaatgatgtcccagctcaagaatggagaatttgcccattctctgccttttcattctgtcagggccctcaacagatgggatgatgacagctcacattgatgagggtggaattcctttactcagttgactgattcaaatgctaatgtctacccttacaaccatacccagaaataatgtattaccagctatctgggcattccttaacccagtcaatttgacacctagaattaaccatcacagagtagatcttaaatgttctcaccatgcatgcacacatgcaagcacgcacacacacacgcccactcacatatcaaagcctcacactgtataccttaaataatacctagtatcatatcggataaggaacccctagtctccctataaataaggagctacagtttctcagcttttctcaaaattatctggaaattctagtcaatgcaggaaaggaaaaaaataaaaaataaaattggaagtgtaagtaccagaaaggagaaaaaattaaaataactagtaaatggtataattgcctacctgaacaaagaacaaaatgaaataaaaagaatcaaacaaaaactactcaaaacaatgagtttattaggttacaaaatcaatatgcaagtatcaatagcttttttaatcagcaataaaagaatgtaataaaaagataaaatcacaataaagtgtataatatcaaataattttaaaagggaatgctcattttctatttggagtaaattacaaatgaaattgtggaacataaaagaaaacttgaaaaaaatgaagggctatattgtaaagattacaatttttctcaatctacacatcagaatcttaaaagaagattttgaggagaagcctgacaaaaagtactctaagttttactttgaagaataaatgtgctaatgtagcctaagatttttaaaagagcagttaagatatttgtcctactttaattaatacatattataaagctatggtaattaagatagctttaaacaggcactgaaatgaaggtgcctgtcagtggaacagaagagacagtataggcacataccaaaatttacataaaattaatttgaaaataaagatgacatttcaaatgggagaaaacaaaatggattatgtcatttgattcctaatgaattaaaaattttagtgtaagaaataaaagaacaaaattagtaggatataatatattagttatggaattttaagtttaagaaattgttatgggttggctgtgtccccacccaaatctcatcttgaattcccacatgttgtgggagggacccagtgggaagtaattgaatcatgggggcaggtgtttcccatgatagtaagtctcacaagatctgatggttattataagggggagttttcctgcacaagctctctttgcttgctgccatccatgtaagaggtgacttgctcctccttgccttccaccatgattgtgaggcctccccagccatgtggaactataattccaattaaacctctttcttttgtaaactgcccagtcttgggtatgtctttattagcagcgtgaaaacgaactaatatagcagtctttcagagcatgatgtcagggatgaaaaacacagatatatataactattaaaaagttaaattttctgtatggcaagaagtatcataaacaaagttaaaataaaaatgacaaactgaggggaattattcacaataaacatgtgactaagtaggggttaatatttttgatatgtaaagaactcttacaaataagttagaaaaaagtaccccaaaaatgaattgggagtttaatacaatagaggcacatctttttgtaaaacttagtaaggcatatctttttcataaatattctgaattagagtataaaatgacaaatggagaattttcaaagttaaggaaaaatctcctaaatttctaataatatctatattgtatggggtttttatataatcctttagagtaatatatatatgtgttattatatatatttattatataaactgacaaatggagaattttcaaagttaaggaaaaatctcctaaatttctaataatatctatattgtatggggtttttatataatcctttagagtaatatatatatgttatatatatatttatataataaatgtaaaatgtaattcatatatattatatatatttttatatattatatataataatggaaatgtatgcaaagtgtaattttaattacatacaggttattatgttgctgagtgtatgcaatcaaattaaacatgcgtctgacatgactccactaggtaattcattagtgaaaaatgcaagtgatcagtaaccatgaaaaaaaagtttatcccaacttgtacttaaggaaataaaaactaaaatacgatgtcattttcacctatcatattggcaaacgccaaagcaccaatgttggcaaagatgtggagagggacactttcatattatgctgaagagtgtttacatggagtatctctcatctgaaatgcttgggaccagaagtgcctagcatttcaaaatttttcagattttgaatatatgcatatatgtaatatatgtattcttggggatggtacccaaatctaaaaatgaaatttatttgtgtttcatagacactttattcaaatatcctgaaggtaattttatacaatgttttaaataattttatgtacaaaacaaaattttcactgtgttttgactgagacctgtcacataaggtcagctgtggaatttttcatttgtagcatcatgtcagtgctcaaaaagtttcaaattgtggagcagttcaagtttcagattttcagagggattctcagtttgtacagcctttccaaagaattaaacatctttaaaaaaatgcatacttttggccctttatttttacctccagtaattttcttaaaagttaatgatctaataaacaaaaatgtaagtagatattgattatgatgtttattttagccataacattgaaagcagtcagtctagtaactggaaacaaatttgacaaatcatggtgcatccatattgtggaatattatgcagccatcaaaatgtaatagagatgtatttttattgatatggaaaaatgtttattaactttttaagaagcaagttagaaaagagtatatgcagtatgagccgatttttttgtaaaagatacaaattcaaataagtatggaaagaaaaagttttgggaggtaaagacacaaaatactagccctttctggatggtagattatttgagacttaatttgttttctttttgctcttccttcttttccaacttttctacagtaaaccttcattatttgggtaattagtacattttcttagcattttaaaataaaacaatccatgtaagaagcaaggatacaataaaaagcacacttcagtgcctgtagcacaataccagtgtggtacagcgataagagcacagatcctggagccaggctggcctgcattcaattcatctggattctgctactactgacagtgttacctcaggcaggtcatttaacatctcagattctgcatctgtaaattgctctagggattagcaaaaatgtaaatcacctaacacacagtctctggcacatactgtgcacttaacaaaaggttaatccttattgttattgttgttgttgtaaatgccaaggaaattaattggcctgaagaccagaaacaaatttgtattgttgagaagaaacatggattaattgttaagaaatttttgtttataatgtatcatcttaccaaatgcagaggaggtacatttaatccatggtttcaccagaaaataactgcttatcaaaacttgtcacaggttaaagttatgtccttgtagaacatgtgcctttctagagggctagcaaggaaagttttcaattgggtaattttagatcctaagcagggtattttgtgtatagtagttgctcagcaagcagtaaatggagtggaattcaggttgtttgcctgggctctcctctggttacacttttgatgctgaatgcccttcactgtgtggtggcctgtgatcactacagcccttattgagagaaaacactcaagaagataaagatcaaccagccttttctaagttttatctttaggaattagagatagggagttctgtaaataaaaggctcctgctttctgtgtcagctgttgtagtttaactaacacattggaccttttgtggctaagttaatatttattgatatttattaatattattagttgactgtgtgttgggcactatgctattaaatactttactacaggaattatcttctttaatatgacaactctgtgctgtaggcattattattccttctagtaggtgatgatccctggactcacccaagatcacatgaatagtaaattcaactgggagcttgaacttgattctctttgatgtcaaaaactatgctattcaacactttgctactttacttccccattccttccaatcaacaagattttttttaagtttgtgtttcagtgtgtctcatttcttgctatgtatttcatggatttgatttaaatccttttctttaatattgatgctatgagaagcctggttttaaataagtatataaaacattcttgaaaagtgtgtttttcctcaactgaattttggttctaaaattttattattgaattgttatatatatatacacttaccacacctcccctgaattttttgttttgttttgttttgttttttgagatggagttttgctcttgttgtccaggctggagtgcaatcccacaatcgtggctcactgcaacctccacctcccaggttcaaacgattctcctgcctcagcctcctgagtagctgggattagaggcatgcgccaccatgcccagctaatttttttgtatttttagtagagatggggtttctccatgttggtcaggctggtctcgaactcccgacttcaggtgatccgcctgccttggcatcccaaagtgctgggattacaggcgtgagcccctgcgcctggcccctatttgagtttttaagttttcgaaggcagggattgtgttttactcctctttacagtccttgcccatagtaggtggatagtaaatattgaattgcatgtctccattgatcatattagaaaacaaacaaaaatgatcattttctattaatctgttaatttttttctgcaaatgtataagcaattcagtatcaacccttagatctgctgctatttgtctaggttcctaggcacagagatatagcacctgtgccttcagtctctgtcagttgtggtgtgtcatagtatttaagaactgatgtttccaatgatatatatgtataagtatacatataataatataattatatacatataataatataatataatatacatatggatatagttctgcccagaagaagccactcttacccacttacatttccatttgctttctttttaaaaaaatctctttataggccaggcgcggtggctcacgcctgtaatcccagcactttgggaggccaaggcgggtgaatcacaaggtcaggagttcgagaccagcctggccaacatggtgaaaccccgtctctactaaaaatacaaaaaattagctgggcatggtggtggccgcctgtaatcccagctatgtgggaggatgaggcaggagagttgcttgaacccgagaggcggaggttgcagggagccgagatcgcgccactgcactccagcctgggtgacagagcgagactctgtctcaaaaaaaaataaaataaaactctttataattacttgtcttttccttttaatttcccttacttataaagtgttggtagaaactttaaaaaattgtttattttgtaattgacaaataaaaattgtatatatttacagtgtacatcatgttttgaaatacatatacattgtggaatggctaaacccaccaattaatatatgcattccctcacatactttatttttattgtggtgataattcttaaaatttgctctcagcaattttcaagtatacgatacattgtttttgactgtagtcaccatgctgtacgatagatctcttgaaattattcctcctgcctacacatttgctttcttaatgtcatctcaccttggactcaccctgggagtggctgtgcacatgaacatcgtctattgtgtgccagccaaaacaacaaacagttggaagtaaaaacaaaaaccaaaacctcgttagattcccagctccaccactcactagctttgtgacctaagcacatcacttaccttctcagactgttgtcaagaagggaaaaattgatgcaggtgtatgtgaggagcgcttagcacatggtagacgttcagtaaattcatggaactctgaaaaaaaaaaaaaaacccttattttttataaacccaccgcctggccttaagaagtttcatgattctactatgaataaatttaaagaaaactgaaacacagatatgggatttaaaaaacaaaaaggggaaaaggcagtcacaggccttttgggaagtatctgtacctgagtgatgttagaaaaaacttcagtattctggaattcaaaaagcattcttcaagcagttcaagctgcactgatttgaggagcatttttgcttgcataaataaaacactaaaaatgttattgagctattccacggaggagatacatacctggtaacataagactatgttttcatgcagtttttattcaaggcaaaacataaaccaatgaaaggaaaacagaaagtgataagtaacgtggctatattttccatgaacatatggtaggtgtttaaaatgaggtatgtcagctattaattccccaggtgcttgccttagccttgataataaggttttctatggagggatttcccatctcttgatattttgatctttgggaaaatatgagaccgactcttctctcttgggcacgtgttagcaggaatatttaaaaagcattttgcactgattgaaatgcaaagggtttcaagaacaattctgatgagtgtgtctatcctaaactcagttattttctcaccccaaaacgccagagaaaccagagactagggaaagactgttttgttctcaactgaacatggcacgcagatttaacagtaggacctggttcctcatgctggctggttcctcatgccatatccatctgatactggatttagcttacagaggacgttaacccatgtaagtcaaagccacagacttaaacatccagaaagtataaggtgggctgaggggcagccctgtaaggtaagatcttatttcaacgtgattaaatgccttctattaggaaaattgcttttttgcttctgtttttcatatgtaaatgttaacgtggtatgtcatagctctcaaataatttgggagaatatggaaaatcattgaaatgttgataaaccaaattatttaatttttggaatatgaacaatttgatttttggagtgtgaacaaaaatattactaatgaaatcagtggacttaatggtcttactggggtcaacttctgtggctcgatggaaagaaaaaataaacgaactatgtaggagcttgaaatatgaacactcagaattctgaaattcattttttgaatttcactatgatgtttggtgttttaaaacacaaaattatagattcaatatcagccctgatatagaatgttctgaaataatgaagagctggcatttcacaatacaggataaccagacaagaatttatctgtacctgaaagtttggtgacactcttcgaatttctaggaaatggaaatgtgactgatttttattgagagttttcaaggtcaaagataggaactgctctcaaggcatgatagctagaaaaatcgagggggaaattgatgtgaaatattgctgaattaagtgtttagaaatacgtaagtacaagttctggcaggtatccatagacaacaaggcatatatcatctttaaatatcataaggttaattttggaaatcagtggatttgtatatctcacgaacatttcaagtggaatactggcttttttttttaaataagaagaaaacaatgtcattagtttttagggtttttttaattaaaagttcagttacagttttttagtgttaatattttaacttcttatttgaacgtcattactccagtcatcctctttattttttcaactcttattatgtgcaaagcaccaaacctgattcttctaattacaacttgtattttaccatggcaattcggataatttaaaatagatgaacgctttgggtttattcactcatgttttcttttttaaaccaatgttttataacacctactaagttccaggctctttattctatagttttatgcctactctccttttctccattagaagaatgcagatctaagctttaaagaggcagcagcatccaaataagagtcagtgcgcttaaccaaagaacagcttttaactgtttcctagtgaaacattttgaaataaaggtctttctaccggggcaataggtgttgtgccagtgtcacaccagagagtagaagcctttgaagagcccttttgtgacttggccactctgcaaaactctgtgtctgaatcctcaagctaagtggaatcttgattatgttttctatttgtaaatgctctacagcttatccagcatgattctatcattttcttacttaatcctcccaaatacctgtaaagcaggtattattgtcctattttatagatgagcaaactgaggcttagagagattaagtgactttagtttccgatggccaagtggaaactaaagcttagtctttcttccacagctgtgttggtgtatatcgacaagtaaaagatgtctatgcaaacacagactaattctagtacatacttaagagatttaaaagatagttgttcagtcagcccatacaaagaaattgtttcttagtcctaagcaatagaggcagtttcaacagatgtgtagacttttgatatgagaaattggtttcaaaatcaggagtcggggctttactgcttttcatgcacagaaaaaaaaaagtgtatctctatgaattgtcacaactgattcctctaaattctgctttagaaaaaaagaatttgttatacacttgaatcttaaactgtagtaaaattaaggtcttttggaaaccaggagaggtgttggtccctggggttcctttgaatcatatcagagtacactattgaaagaaggagaaaacaggacaaaaaatattttaaaaggcataagacacataaatgaatttttaaaaatagtttctattggccaggtgcggtggctcacacctgtaatcccagcactttgggaggccaaggtgggcggatcacttgaggtcaggagttcgagaccagatcattgggtaccttgaaggccatgataaacattttcgtcttcagcctgaaaataatggaaagccactgaagcatgccaagcagtagagtgacaaaatcacacgggtcctttgcagggatcactctggctccattctggagaacagaaggaggactaatgttaatgctcaccagctagtcaggatgtttgtttttttaaactcagtccttttagttacactttatctcttaaggttcattctcttcctactacatcttatcataacttacttttgtgctactcaggcagaagtttttcttttttaaaactttttattgacagcataacggaacatcatgaaaaaattttgccacctgaaaaataccatattctcatttcttcaataaagttagttttacatttatagtttctgttactatattgttctcctattgatattgcaatgtctttatcatattccattgagatgtattaaaatttagttacgtgttgctccacacttggacatttaggtaagaagttttaaccgaggatgacagggatcagtgaaatgctgtccaaatatattcttttccattttgcagcaatagaaactaagttgggagagcatattctgccactttcaaccccaattatgtgaaaatctccctttatgaagaatgtaaagtctctgagtatttgtattaagagtaatgcatgttgcttaggctgttaaggaaatattgatttctgacccttaactgaaatacttagctttcatttttcttctttttacatgaattgtgtatattgtgttcccctcagggaaaacttaaaagcattttgtgttatgaaggctccattctaggatcttattgcttttgagatgaataaatggaatgcttgctatcactggaacagccctttttttttttttttttttttttttttaatgtaacaaggcatacaagtaatacagggctgaatttggccccagaacttctgaagttccaagccagtttcttacggccaaatttagcttccagctttcagttgatgaggagctttggcatataggcaatctaatttttgttcagtaaaaacctccttgggtgttttaaatataactttaaaatttgtattaccaggtgatgcttaagcatttcttagacattgactctaaataattgctcagaaaacaatgtgccttaaaggtgttttataccagccttcgaggtattagaatgagatgagttggcgccaaaacatttcaatatgctataaggagatgaaatatggccaaacaggtttttatgttctgattattcctttttcctgttactagccagaggcaggtaaatcgactttacatcccccacccccccaagcccaccaccacagcaattttatttttatcaaccccttaggaaatttcagagggttttttttttcctattctttgaacacatacaatgggaaaattaaaacttctaaaagtttcttatctattaatctgttgatgagatgttgctttaaacacattttatattactaattaatttaattatacatactgcagttgtattaacacattttctgttctctgctctaacgtgacacagtgccctcccgcagccaccttaacctaaagctttaattgctttctccttagcctcagctcatgtttgatttatctgatttctttgtataaagattctctagtttacgatgtgtacacagtcattaaattggtgttgatgtttatgcagtgaacttgccaactggttacagcggacatccctttatgaatttatgatggggcaataaagacaagtgtcagaaacctcttgtctgggaggggaatcactttccttgtgctatgttggagacagtaatgtggacacttccactgatttgtacagcaaaggataatgttgaaatccagattttctttcaaatcgtgggcactctctgatttcttgtagggagatttttcaaatattggcgctctttaatttcctgcagagtgtgtgtgcgtgtgcatgagacacacacacacaaatgtttgcacttttttttttttttgagacggagtcttgctctgtcgcccaggctggagtgcagtggcgcgatctcggctcactgcaagctccgcctcccgggttcacgccattctcctgcctcagcctcccgagtagctgggactacaggcgcccgccaccacgcctggctaatttttttgtatttttagtagagacggggtttcaccatgttagccaggatggtccggatctcctgacctcatgatcctcccgccttggcctcccaaagtgctgggattacaagcgtgagccaccgcgcctgaccaaatgtttgcatttttaaacaaaactatattatatttgagcattttaaccaggcattcaatctttgtaaacgtgactgtctatatagctaggttatttacagagtcagtgtcaataatccagaattctccagctataaaaagtaaatgaagtattaaatatttgaagacaagggccctgtatagttttcttatatctgtactttttttgcgaaaagaaaaaaaaagccaaaaagacattgttctcaagtcttaagttacgaggagctgcaatttacattgtttttcattatgggaagatcttcaaagattgtaattgtgagtttaatttactaacaaggagcagacatgagtcttcttgactgagaatgcaaacatactaatttaaaagtagatttatatgtattgtattagtgcttcctcctgtgtacatatactggtttgatctttgcccttttacttttcattagtatttgaaattagaagtcagaaaagttgattcttaattttcatatacactacagaggatttatctgtaaatattatttatttcaaattttcctatgtatgtataagtttgttctcatataaacaatacctttaaataactaaagaattaagatagaatgtaagagctcagaaacataggaagagtgagccaaataaggaaaaaacactttcgtgtttgaagaaaaggatggacgaatagggaggtggagagaaggaaggaaggaaggtgttccagatggttttgaaatttgtgcagtagaggagaagattctcaaatgtcatgtggttttctgaagagacaaaaacaggactttaatgttgatgacagagtagataaactggaagtgagatagtgaaattcatttttatctacatttcctctcaattctcaccctttatgggagctctttttcttcatcctgagaaaattcagataattaaatgcagttaagagtgcaaactaagagaagaaatacaacaatgtcccattaggaaggttgtggctgatgaaggcttaaaatacttgctaccacttaacaagtaaaaatgactgcaatgtcatagaatattcttcaaatgtctttaacaaaaaatccaaataaactagaactaaatgatggccggtttacgtttcaagatgagaaagcgaagtgaggaggactggttttgatctgcagcaatcatctcttcaatagatacttttttactgagatcctcaactatacagttctgagctaggcacatgcaaattaaagagttgcgtgaaatatggttcattttattgagaaccttactctttaccccccagtttctataatgcaagtactataatgtatatctctcctaaatgaataatataaatgaagtgtgacccagatatcagctgattcctttgactgcacaagtgaattgcttttaaaccaacatagccttgatgcaaaattcagccacttcatcagcttccttaagaaatccagtcatatcaaggattttgtgaattctctagttttgctgaagacttttagtgtcaaggggaagtgtcacatcacatagcacacgtatcacttgaaaaactccctttatgcaatctcttcccaggcctcgcctcttaactttaatcgcctctccacctcttctcctaggcagctctcaacacagcttctcagcaattcaggctgagtagcttcctgctttgacaagaaacttgcctgccattagaaacacaggcctgggggatttatttcaacccctatttttcaacccacaggcttatcaaagatccttttcaatagagctgattcttcctacaaagaaatttctaaccagcatctaaagaaaattttctccgtatgatttttttagaagcacagagaaagaaaaaatcacttcaaagtagtgatcaagaagctggatcttgaagaaatgtatatcaatcagaataggatttgttacgctgcttcgacaaatagcaccaaaaacctcagtggcttaacacaaaagagttgtttcttgggcacacaaaatcagtggtgagttcaggctattctctgaggctggctgtcctccttatacaagctcagcatgtaaagtttcttccactttgtgacaccacactcttaacaagtacctccatgattgcagcggcaatagagagggctaggggagttcatagcagcaagtgaattcttcagcccccaaaatagcacacatacccttaatcacagtcctttgtctagtgatcagttgcatggtcatgcccaattcatggggaggagaggtatagagggactgggaaacacagtgtatagaaaaaggggaggagagaaagaatggtgagattttgaatatctgcaagatggaaggggttttggtggcaataatagaggaataaaatagagaagacaatgtggtttggttaggattttatatttgtgttgcagagtagtgggatataaatttggaaagatagtttgggatattgtgaaaggccttagagtgcaggccaagaatctgttttattggtgacatggagctataccggttttgggaagtgtatgaatgatccatttgatgtcttgtgtacttgctaggtggtgactgctggggccaatttgtagtcaatttagagacatgaagatcagttaaagactttcttccaaatcagcttagtataaggaaaatacctgcattctggtgttcttggggaaaatgcaaaggacactgtcctaatccatcttccctctatgtgtgtcccagctgaagattcttttttgcatcctatctcacctcattcaattaacatacccttttaaaaaatcacttttaagacccaccaacaggaaaataagatgctgaataaccacacatcacaaaatatttatatttacaaatactagtgatatcatgagcgtttaaaatgtgttaggatatcgctatgtgaggatgacaggattgatgtagaaaactcccattacatgacagagcaatggaaacaaggaatgattctgatttatgactgtatttacccagtatgaataaataaatagctactatttattatgtgcttaattactatgtgccagacaccatgttagtacttacatcctttaacatgacccacaggcccaggatggtctggcaccagctacttctccagcccccatccttccactgagcccctctcactctgcagtagggctctgggctccttgccatcctgccttcctagctggctctgactacacttgtctatgatcaaatgtcaccttctcaaaatgctctccctggctaccctacataaaagagcagcatccccagttattttctatctctgtatagtgccttgtttgtcttcatgaagtttgttacccccagagagattctgtatttttcatttagtaccttcactccttgccagaatataaattccatgaggtcagagatttttctctcctgtaacagtgcctggcactcaatatccatttggtcaattaatacatgacttatttaaacctcataagaactctatgaggtaggtaccattaattttcctattttataaacgaagaactcaagtcctggggtgattcagtatctccttcaaggttttacagtaagtaatctgccaagccaagattaaaagccaggaccgtctgattccaaagcccctacttttagccataatactcgtctggtgatgcgatactaagatcatggtaattaaaagttactgtaaaattattccttgagaatgtgtatgcttgagccatttctctgacattaatatatatttattgaaaacatgataaatatttctatatgtatgagaaagtgaacttacttcccccttctccccctaaaaatggtgtcttgtggagctaatagatggtgatctcaaagagcgaatttgctcatatgggccaaatgtttcctcctgcagagtgggctgcttcccaaagaattagccctcctcaaaatgaattattaaccccagcgtcctggccaaattcccacttggatagcctaggaactgttcaaaacttggaatctattgaaattagcctggcttgattgcagtttctgcattaattgtgatataatagagtttctccagagatttgagcatatattattctaatgtgtataagctcactttgtctcttaatcttttttagtttcttcttcccctcgtgagatatagcctgaatttctttataagtttttgtttttgttttaatttcccagaatgaatgacagtgagctctttttttcttggacttgtcaaagctttttctcacttgaatgactagttagtctcctggtcattatcgcagtgtgttgcagacattagccacagaagtttctagatccccaactctcttgtgcaactatagcctgggctagggaaaagtttgctccatgaaattttcctaattgtttctttcaagtttcttcaagaagcttatgttctggtgggagacatataaatattttaaagtttaaattaactgacctaatggtggaactattcaggacttccatattcatcctacagttattggcttttaatttctttaggcaattttgttaaatgttataggccacttgtgttgtccatgagcagatatagtatcacttacattctggagggacagagaggtatgagtttagttaaattactaaatcttacacaaaactaaaataccttagaaattcattgccttgcattgttttgatggcaactgtagacctcatataattaatcacatcttgccaatatcacataattattttatctgtaagttgaccttgcttgccttgagttggtataatcaaatcttcagtgtaatagattatattagaatgggtaacatcaccaatgttttcatatccaaagtttctccctaatctatatgaagaataagaatgaagattttgttaaaagacaaataattattcctaggaagtagttagcctcatggattttcaacatagggaaagaaattgagaactcgaagcttaagttcttgcatttaattctgcctggatcacaaacaagtaataagtcacaaatgcttcctgcgttcggttctttacctttatcaagtgagatgagacaatggatatgagccatgtgcacttagaacttcagcagctaatattagaaaaatgctttgaaaatgacagatggaaagagctataaatgcaattgctaatggatttatgtgttctctctccctccttccaacctatttctgccagtattttccaaaaaatttcccagagctccacctgaagtgtgacctgatgacaccatagcacatgtgtttcctgagttggttgagtgtttccaaaatgtatctacactttaaattcaaatgtttatccactagggtattaaattatggaaagtgttactgccttggaatgacagtcatgtacttctgcccagactattatgacaagttctatggggctttctacaggtttttccccttctttctgaatcaatatgggctaatagaaatatataatttctcatgaaaaaaatccagattttcattaatgtaaatgaattgatagagaatatgcttttaaatctgtaacatgcagaatttttccctccccttgtcattagtctcctcccaactaagtggttctaactgctaatttgagaattaccggtaaagactaacatttcccttgctttccttgtgcactctaaatgagacattccctgtttcagactcaggtcaagcactgaagaaatattcattcccttacaaaatacttattgagctatactgctctcctagactttttcctaagaagctggacatacagcaatgaacggaacacagaagagaaaatccaagtgcttattagtaaatccaccagaatgtttcatttggcatttttttgtaaacatctagatttgttcataaagaaatcagaaaagcattcgtcctttggggagtattaattgttttgcaagaaagttatttatcttacaaaaggactcactttagcgaacagcaaattcccttcatgattcaacttaggatatttcaatttgcatttacttcagtaaagcacagtctatgttgaattcccttgctgacaggttttatgcttacaataacttagggctaatagtcctaaatgtccaaaagaaagtaatgtctccagagagtgtagttctaggttcttctataacatctttagcattccattcacttaaaatgaaaacagacaatgtgttcaggaacttatgggagagaattaaaagaaagcataaccagtcaaatgccaaaatgctaatttcaatctctgtttctacattgctccagtcacctgacttgttaaagatctcgcctgggatgaggcagctatccatcaatgttcgtagaattgtacaaataccacaacaataaaatgaagataggtttattcattccttgtagtagtatgttcccaggccatttcaaaattggctagttaggttggaaagaagatgaagactttataaaatagtggcttatgcatttcttccttaatttcctgtttgtgctctacactgtatgaaaattttacacctacaaatacctgaactgacaaagtctttcctttagtttctgctaggtcagacttggtgctaaatggaggagagtttgtcagtatagtttcctcagtatccaggtcaaatccaagtttcactcttttttttttttttttgagatggagtctcgcactgtcacccgggctggagtgcagtggcgcaatcgcggctcactgcaaactctgcgtcccaggttcaagcgattctcctgcctcagcctccctggtagctaggattacaggtgcctgccaccatgcccggctaaatttttttttgtatttttagtagacttggggtttcaccatgttggccaggctggtctcgaactcctggcctcaggtgatctgcccacctcagcctcccaaagtgttgggattacaggcgtgagccacagcacctggccaagtttcactcttatatggggagccagagtcctgagttgaatggtgatttctatccacacttttgatctctttgagataattttcattcctcctattaatctcttgctaaaaactatcctctcttacctcctgtcagtaaatgtcttcatttagataaagcataatcaatattttcatggtacatacatacaaatagtatcttagatttgcttaatgattttctgcttagagtctaaaggccatttctggcttatttcttgccatgtggcaatccttaagtgttttgctaacttagagaatgaaacccactcagcttctgttgcatgaggttatatttccaattactgaaataaaggtatttaaattaaatattttaatcatgtatatgattcagtcagtaacacatgagtagccaagatacctttaaacagtacttcaggctacagtcggacctttatgtctgcgggttccacatctggggactcaaccaattgcatattgaaaatactcatgaaaaaaaagacaacaaaaataacactgcgacagtaaaaaaaaaatgcaaataaaaagtgtagtataactatttacatagcatttacattctattaggaattataagtaatctagagatcatttaaagtatacaggaggatgtgcataggttatatgcaaatactacaccattttatattagggacttgaacatcctcagattttggtgtctgagggagtcctggaagcaatcccccacagataccttgtttcagatgaaaaagcatcatactctatgggtaactggttaactcaccttattctgatatatgaatgccattcacattatgctggatatgggtcaaacttaagttcttctgcgaaagccacaacataccaggcatcagaaatgctagagagttttgaccatcattcagaaaaacaattgtttaacagcaaccaacaattcaaactatttaacaggcaccagctgtcagaatgaatgctcaactaatcaaagcagttgctggccatagtggttcataccagttgaatttagctgcattaaaaatttgtccttttaaggttctgtttttgtggagacagccattttcagggcttcctaaatccttgtaagaaatatttttttgcaaatacagaattatttatttctaagaatataaagatatactactaatttctaatatacaaatcaggaggaataagaaatagctattgctttctatcaaatcttactgcttaaatggattaaaaaaatatggctggtgtataccttcacatgtttatattttaaatatgtccaccattatttctctttcttttgtccagttgatgaatagaagcaaatatagtagagagatgattagactattttctgctgaggtcaacttgtttacccaagctaagaaaagccttttctgaatattttctgatttttttgtccaaattaggaaaaaaaagccacatattaatatttaagtaaactataaacatattatcagcatgtagccttattttttgccaagaatacttttaattttatgtctgtactttcttttagtccgtaagtttccaatttatttgtatttactcagcattacattccattatggtggcaaaaggttaaatactatcaagtggtttgatattttagtatttaatcacttttgtcttgaacgagtgaatgtttagtccgtagatatccagatcatgaagatatgtatatttattttgggggggttggttatggtgtagattagatggtttatgatcttataattaccagaaaaatacatgttcacaggtatgatgaaaagacattttgaaggtgctccatttactaatcagttgatttcgtctatatacaaattagaaactcacaaagtgattttcttttatatgctcagaaatactttatatttaatgtattcatgcattgtagtttaggtaaaatagtaatggggcccaaagatagacaatgttgtggcagtaccttgctctgtctccatcttgatttagtttaactttcactgcagaggctgttctaaaaaaaagggaaggaaaaacaaattgataagataaaactgtggggagttccaaaacaaatactgctaactgaccttttttgatggcctgggtaagagctttcttattatggttggttattatagttgattgctttatttactagtacaatgcagaacaaaactaaggtaaacacttgggtgatatcttgttttactttgtcatattttgtggtagactggtaatgatgcttctcatgtgtttttaaaagtcagataaattctgaaacattttaagaatatgagactataattaaacagaaaaaatatcagctgttttgagcctgcctttcttagggtgttcgtctaagtgtctacttgtatgaaacactcatttatatgcagaaagaagctctctgtgtatgttagaaaaagaaagtagttctgaacctttcagccaagttcctaatgctgttgttttataccttagagttttctgtcttggtgaactttaaaaatgaaagaactaactcttattaaggggttgtgtttcctagccctcctgattgagactttctccataatatggtgcaagaaatggtcagtcactacgaaggttctccttttaaccactcctgtctatcacaagaagtcattagtttacagctacttccttcttgtttttataacttttaaacttatcattaaccccattctgttatcccatactctgagatgagcaaagaagatactatccacatttccattgcttactctagagataataacctttttgaaaaaaaaaaagataaccctcagcttctttaaacaacctcttcctctttaaatccatgttagctatctgttgtccaactagaccttcagtgcattcttatggtaaatcagacaaaattattcatagcataatctgtgcaagtaaaattgaacaggacatactgaaattatttattatagcttttaatgttgcttaataattccttaatatttgccccagatttttttcacctagacttttttttcctgttactaaagaaatgttgtaatggactaatcactaatcctcatttccttctaactcagtctcataaggcactgtgtctggacctgttaagtaggattgttgtcataagattagatacaagtatctcagttgtctagacattatataactctctgctacatacttcagactcttgttttaaagcaatcccttagcctatttaaaatgaataaattaaatgttaatgaaaagtccaatgcatttatttcttttccatagtgtgtcattgtcaccatctggatttgccatttcttcccagttctttacatgtataaagttttattcttgttttaagtaagagctgattttcactatttcaattttgatgtggataaaaagttggtattttctgcctctttgtgttcctaaatcttccttctcattttctatctggcttttacctccactaacttccctttctgtaattttaaaatagtattttggggatgcaaagaattcacttgtcaccttttcaaacttgattagttcaacacgtatttattggttacctcttaaatgccaggcagtgaactagcttctggtagtaaagtacggatagccagtctctactctcaaggcacatatggtctaatagggaagacagacaaacaggcaagcatttgtaatgcagtgtggcaaacggggaaagatagggtggcaaagaaagacgtaggatatgggtgttacgtaacttgcaggaaaaaaatctggatattggcatctataattcctaggtagaaacaagatgttccataagagtgttctctgagatcatgtgtgtgaaatttgttttcactggagaaatcagggacatcttaaaagagaggaaagccagcgaggtttggccaagccattttgcctccgtcaacctcagttttgttaggcataaaataagaagtttgagttagatgaccgctaatatcctctctaggtctaaaactctgaatctgagtttttcttttgcagttcactgaaaaatctaaatagcctaaacctgttttgaaatctatttcaacaaatgacccataaaataaataagtacaaaattcaattttttggaaaagtagtctggccgtagaattgagtggccccataaaatattaatttggtcatagtgtggaaatgtgaaatgattgttaaatgagtcaaggccttatttgtggcttttggctcatttagtaagattacccattagccatgtaggcagcataacatgcatggccaagcagctcatgggagcatcctaacaaatgttaaataaaaattatctttctctagccttgggaatatatttctgttatattcaaaataagattgtgctcagctttaaagtctcagtcaataggaaaataattatatttgttatgcttgaaattctgaatcttatctgcaatatttttgttgcctttttggaagtttagaggtaaaatgagtgttggtggtatcggaccatcacttaattccatcactgccattcatataaactcacttgattctgttagaatatgtatatgtaacatttctccttgcagatgtttttgtttctccttatcctaaggtactcaccttttttccttttagtcattaactttggtgtcttaagacattccttctccgcttttctattttatctacatcttaataataaatttaataactgttcttaaaatctttggatgataatccatcaggctcattcagtattcctttagcttatctacagaagagagtatgcttttctctttgctctttttaatgaggccttcccactgtggctctcagtatccaccaaacattttaatttcttaggatctgacaattattaacatctctcaaaccttttctgaattctataggaggctattattataattcaatctatttacttccatgtaaactcaaatggaagtgaatcttcctgaaatggtcactttcccctcctcccaaatatacatctgccattaaattaaaaaacattactaatttgaatgtgaagcctgcatttccataacaccaaacatctggatgaaaagtaaaaaattcagagatgttttcaaatatccgaatattgtgttcataaaacagttaaatgattgtctcaatctctccatattcatctgagtacttatgcatcttatctgtggcacagccagtcctttctgtcaggaaacagcaccaatttcagaactaatgcattcagtaacaagtatgtattgaacacttgttctgtaggaaatactgagctaagtgctgtagaaagtttgaggttaaataattctttaactctgccctcaaatgatttgcagtccagtgagggatgtgacacaggtgcacatgtatacataaaagacaatatgaagtgaataaaaacacaagagaggaggaaagaaagcactgtggaagtttgtggggagtgactacttctggcttgggagggttttccactgtttgaatgaactatgatggattagtagggcttggacatgccagaatcgtggaaatggaggggaatgttttgatcccacaccatttgaaatatactctccttcagcagccgggtaagggaattttactgaattcaaataaccctaaattagccagatgattgcaatagtttttgtattatttttcattatcacagcctttggttgctgtaaggttattgagtctaaatgtgtttttcaggtattttgattatcaaatttatattcatttcactttagagtttcaactttacacaaaaaacatgctaaaatttactctctatggtcattttaagaaacattgttaaaattccaccttgtcatttgcttttcgaatttagatacaaaatgttcacactttcatgtacattgcatgcttaaagcctctatctttcaaattttatgatttaaaaaatctattgggatcactactctgataaacttttaaaaaatcttcaattctaaagtttttgctatttgaccagaatctgtattgctatagaaattaaagcaaaatgaatcatttcttttttattcttttcctttttcttcttcctcctccttttcctcctcatgcttctcctttttttttttttttttttttaacaatcatttctagctggaggggaaaagggaataaactgaaaaaggtccacataatccaaatcggtctatgtttattattcagaactaatttattggctgaagtgactgaaaggtaaaaggtggttacttttaggtaaagtttataggtgtagaaacgatgttaggaatatattttctgtatctgttggctctgcttttgtctgcatgagcttcattctcaatcaagttctcttcattcagtgacaataatagccattagtaactccaggcacacattttactgacttagtaaccccagtgaaaaaacaacacttttaacagtttcataactgactcccattaacctaacttgggttccatctttaatgcaaacagcatgattatctgtgttgactggctaaacttgagtcacttagccaccactgattacatccctaaattaaaatcagggcactcttatcaaaaagaaaggggaagtggtatttcaattaaaaatattaatgttagagtggaaaagtcctccactaaatgttaggatagcaggtggttatcccaactcttaccaaagccaatttatatgacctgatgtagattatttaagccttgtgagcctcggtttccttatttacataaattaggtctcagatcaagttctgtccaaaaatctttggactcttttttttttttttttttttttgagatggagttttgctctgtcgcccaggctggactgagtcgctcggctcactgcaagctccgcctcccgggttcacgccattctcctgcctcagcctcccgagtagctggactacaggcgcccgccaccacgcccggctaattttttttttttttttttttttttttgtatttttagtagaaacggggtttcaccgtgttagccaggatgggctcgatctcctgacctcttaatccacccacctcagcctcccaaagtgctgagattacaggcatgagccaccgcacccggccccaaaatcttttgactcttaatgttttgtggttctgatttcaacagctagagacaaggatgagacatccagaaaatatagaaatttgaatatagaaacacaaatcaagagatacatactgtttcatgcagaagtgcttcaggtagaaacaggagttagcttggcagtagaatagcaaaggatttttactacatcctgatgtactggctagaagctcagacaacttgagagggttgtgtatatgtttgtcagagaaagagagtcagagagattcaaaattaagcatcacaaaccttgttattacaacttctataggtgttttatatcccatgtatatctttgttaaccttctctcattttaccataacagagactgcgtcccaagcacagtcttgtttaaagtaacaaagcttgaatgagaacttatgtctaatttttttcattctttctacaaatatttagagacactgagaaagaatgggggagaaatacaaaagttaaaaatcccaaggctttaccttgaggaagttatacttaacagagatataaataaagcatgacaatgaaaagctaaaaattatgaataccaagtaaattgctatgggaatttagtggaaaggtgattgtcctccactacaaggatgggattggtttaaaatatcttaattgtttcttgttttatcttcaaaattcacgaaaatatatattctattcatagcataggaattcttgtttacagaataaaaaggtattaaaaaaagaaaaaggtattaaattaaggaccattgaataagtttggcattccaggaagatgcgtttatttattcagggcttaagtccttggcatgtctgcctgtaccctattttagtaagcatagtcctagatcaataaatgatatctgcccaatgcatttttattatccacattagggaaattacttagagggtttcatgaatgagtggcatcatcaaaatgaaggtcacctggattaactctataaaatatatgccttggaggggagcaaagaaaaggaagtggtcatcataatgatcactttccatgcataatgatcagtttccacgcatgtactcaaactaagactctacccaacaagttacttgaccattatctaaatgattgtattacactatcacagaagtaacttgacaaattgtgcattgttcagtcagcactcatctggtcagctttgtagaccagcaagtgagtcagacttacagggtaggaaggtaacttaagaggcagaactgatcttggagatgtcttgctttaaaaaatgtccatgaaagagttaccacaatgcaagagaatatctcattgtataaaaaagttaagtgactatagtttcttaaagatatgaagtatataaattatagttaatttatatttaatttataattaatttatataattatatataattacaattaattataattttaaaattgatattatatttttaaaattatttaaagcagtacacacatagacaatataggagtatataaacaaaaagtttctactcgatgccctacacaacatgattcagtgtatatttttccagattttttttgcgctacaagcatagatatgtgtatattttatttatttattaatcagaaataaatgatacatattgttctacaacttgctttttttactcaataatatatggggacaaccttttcatgagaacctcacattttatttaactgtcatccagttgatagacatttaggttaattccaaatttttagccttccagatactagctttttcattcattgtacatatctaatttatgaggtgatttgaggtatcacttaaaatttcaaaacatcaatataaattcttttaacacagaataaagtttatgataaattggtttcagtttggatatcatcacagaggggttaatcacaaaagaagttgactattaggtggttcacccataaaaagtcccagtgatgtattccaaggatattgtagatctatttccatgtacttgacaaacctagttaaccccaaaaggaaaattaaaaagaagaaggcctaaggtcactatcttgaataaagatagcttgctttcaaatgagtccttagaagaatggtaattacaatacattttctatctacgtgaagtcataagccatacatgtcttcttagctttttgaacagttgtcagttgatattcaaagttagaggattgttgtgattgacttctattcaacagtggctttagaattctttcgagatgtgaaaaagtttaacctatgctggctctttcttgatgaggggaatcctaatcattgctatcaggttacaatgacgtgtgctcttatgagtaagttgagccacctctgggccactggactagagtgggttggcccccaacagtgaacagactaaactatagctttagtccaagaatatggaaactgacaacaaattattgcttgtggtctacttccagttttcaagtgcaagcataccaaagtttattttaaatttgagccagtcagacatttagtaatatacatcaaagaagaagtgaaggcttcccatgtttattatttcaataggatgtctgttctaataaagcagaagaatgcatatgatagatcatgtagtagaaatactctagttccacagtttggccttaaatgtatacatatatttgtaaattaatccaaaacacattgtcatggttccaattcctctgaaagctgattgttttcaatcccctttttaattttagaaatatagtggctgattgccagagcactttgaggtaaacagtccaccccatgtataaaaggggcatggaatcatgaatgttcaaaaaccacagaccattatttaaataagttaaagttattatggtcttccctattaattaaaaaaaaagccatctgtgcaaggtgaattttggtaaggtaccaatttttttaatgattgtggatggaatttgcaactgccttcatagtgaaagtacagctcagggattcccaagataaaatgcactgtttatgtaattctgtggccatttgactaaatttctaataaaacactggaaagaattattgttattcaatcagaatttacaaaatttacaatcaaacttgaaggaattggctctccagtaatctcccatttcaactattctgcttacaccctaaacctttatttcatctaaaccttctctctctctcgcttaaacacacatgcacacacacacacacacacacacacacacacacacacacacagagagagagacagacagacagactctacaacccacattttgtcaaaactgccttggacaaatgcatcacaacagtgaacagtgagcaagactaaacacacaaaaaagatcaaaaacactgcataaagaaacagcacactggaagacattaccaatgcagatctagatactcttgtgatgcatccttattttcattttaatttgtgctatttgcaaaatatatttctgttgggtaaataacctataaacctaggctctaaaaatcttggagggtcaaaaagtcaaagggtgcaactcccctgaatttggcaggaaaatgccataatagaaaggatttttacattttttttgccaccgcccctcccaccccaaccagtgttttcagtccattaaaatttgtactccaggccttttccagtttgaagccacactggcgtcagtgatgagcaatccttcttgtttgtgcagtcattcattatctccattaccaaaaggagactggaggacaattacattgtttggacgaatcagagtgttaggaggagtatttgtcatggtggcagagtgcagcacctgacaggcaacgattgatgaccaggaatgagtgtgagtgaccaaagcagcctcataggatgcaaattactgactgtggattccaatttatcctgttcatttttcttgcccgtgctgaagaccattagtggtttttgaagcagtgaaggggtcattactaatgtgggtagactcgaagcaggagggggaaaggaggggaaaagccttctgtaattacacagctttcaggaacaggctggaggccctagccaaaaaagtgtcaacacctcgcaatcagaaaaatttattttcattttatgcttaacccatattaactcaacattatcatctttctttgttaacatttgcagaatattaaaagcctggcttctatattaatacaaatctagttaaccccttttgctatacaggggattttgtttaacctaatggcatttgggtttgctaataagtaattgtgcgcattttggataatgtacgctattatagaagatgaaatacctgaagaataaaatcttagatgattgaaaaacattcactctctcaaatactggaatgattagaatattctgaatggaatactttgttgttcctaatgtcaccctctaataatgttgatgggaagtatttattacaaaaggctttctactttatgaatgactttgacatgctagataaaagtttacttttttgtttaagaaaatcagtgaatttagagcagggacctatttaatagacatatttcataattatgtatacccagtacagtgtcttttaaaataaaggtatgggtctaaactaacaatccttgattttagaatcagagaggaaagtgtcttgataatggaagaactgttcattataaatgttggtgaatttcgataggaagtgaagaattagaaaacaccaaaacctatggcttcattctcttattgttgtagttgaaggtaaaatgtaaaatttctatatgaagtattgcacataattggctccttttgctgtgtgatcattgggtgtgaccctgttagagcagtaacagtaacaatgaaagaatcttctgttgtcccataaaggagtcaacataaatatactgtaagtaaactgtgttgtaattgaatcagttgccatggcttacaagaatagttgtgattatatactacctcactttctaaacttttactgtcaataatctcaaatttaactagagaaggatgattatattgagccatctcacaaagataatttagaataagggctttacataggctgtctagggaggagagtaaaaggggcctgaaaccagttcctttagtgcaacagaagcgagttagatgaccaaaattctgacaccatcacaaaagtgctttgcattctgactgattaaagaaattgcataacttaaactccttgctttttactgctggccctacagagtatgacagaaacatggggctgctaatacaggtttctgggttcttgtccctgcccacatttctcaacacatgataaaaaagatgcaagtaggaaaatcaagccatagactaaagaaatcaccaacggtggttttattcttagaagtaagtgactctttcttaacttctgatccatcttttaaaacatttgtttttccattagcatccgtacccttccgaagagcagaagaaacagttagcgcaagacacaggacttacaattctccaagtaaacaactggtgagtgacccaaaaatcaatgtctttctcccatggctaaaatgagatttctaaataatggttttctctcttttttttttttttctaaaacaaatgaaatcgaggaggataacttctgtgtttctacctcgaggtgtgaaaggggtgattagggagaggaaaaggtaacctagggaaatggtttttgtaggatttattccttttctttttctctctccctctttcttttctcttcttctctatcactcttcctctccacctcacttttcccatctctgatgctttaaaattctcgaattgagccacaaattctgttcaggtcattcctattgaaagtagtcactccgcgggtttttgcacagtcctcatacggagttaccagttctggaaaggattcttttgtcttggctttgagcggtgatgtagatacaggctttttagtatctcctaatagaaatttatttaccctaatatttttttaaataggagaaaaggtttttccatttttgcgatttggtagattactcccgtgctggtgtatggaccatccaccctttgtacacggcttagagggtaactgaggaaaaggaggggcagaggattaaataaaatgatcacagtggccaagaaatgatataggaattacttatcaaaatactggcccaggttttatcagcagcttaattttgttcagtacattcttggggtgatgttcagattaattgaactgacagttctctttcaaaattcagggaaagtatttgcacggatttcaggccttatacaaacttaattacatggaactccattttatcattctaattccatgtagcagaggttgtatttacaaatgagaagtctctgcctttattcacagctttccttaatatatttatcaaagcaggttcatttacaaagtgctctatctgtgggatacaggcaggcagacattaacaaagcttttaggtttatcaggctcgctgcctgatgagctacccgagggtcaattgattttgtggttctgtgattcatttttttctcatttttctaggatcacaatgagagacatgcttggagaattagccagtttgtctgccttatctgtcaggcaatttttttttttcccagggaagtcaagctacttaaattggccacaggaactgccgttatctgactttaatgcaccctatagtgtggatagcatttcaattacaccagtaaccaaagcttagctgcagtccttttcatgcctagtgctgtacagaaagtgatgtgcctacctacagaagcagaaaattgagttgccttgcttctgtcagggtgattaatgcagaaataaactgctaacctgaaaagaaaggcagaaagaaaagatagacaatacagacttgaattcactttaattttcttctaaagattggaactgtgtacatttaaagacaccctttagaccaaaaacttggaataaaggcagtacatccccctctggagggggatgtgtatgtgattatacattgataggcgcttcatagtgtaaatatatatgtaaacatacatattctcatttatgttcctagcacaagttatcagtggtctgaaacagtaaaataaatgtattctttgttaactacaggagacttgtttgctctgcacattcttttatagcatactgattaccagactgagctaatatatacacattggtccatgacgcagttaacattgctttagaatcataatttttgtacatttgaggcaattgagggagcttgtgatgggaatttctgagaaaaataaaatttccgcatggatatttggcattgatatttgatcttgttctttttgaaaatactgttccttatcatccattacctatagtttttgatatactcttcgcacctgaagaatgaagaatttttagaatctacaatctagcatttcccacaattagacacctggctggaactggaaagaacacccttcctttctgaattccattgagccccaaggcatatacacggagttcagtgagtgtgagagtttaggtttcttgtttctctattatttgagccatatttgccacagaatgccaagggttaggatgtgacagtctgtcacacagcatacttcccataatacagcataaacgttgacacttctgtctctacaaaataattccatcttcctaattttcacacttccttcagaaaaatcctataatcctgccctcgggtccaagtcttagttaacggctaccgtaactttgataataaggtgttactcatgaggatagtatagcaaatacctctaaaaaactaccaagaatttaatgtagggcccaaacttctggggatttcagaaagaaatttgaaagtgaacaccacttattttagtgcattttgaacttgcccaatgccttgatgaagtcagcttcaaaacagagaaagctattcaatctactttcaaaagacctcacagtcactgttcttaactacaaagtaatcactaagagagatgagaagagtggactagaaactatttctccaggccctgagagtgctcagtcaaaaagcagaggggatcagagtgtagttcctaaacaaactcattcagtcagctatactaggaaataatgcccacttctccgattgagaccaggaaattaggcttgtgtgctgcaagatttgcacccaaggaattagagcagtaaaaaagcataaaaatcagacaatcatggaagacttgcggttctggttctgcttctcacttacctcttaatatagaaaggccacacaaggtcagggtagttaagcagcactgagaaataacatctgtagtaacaagcgatggaacatggcttcacgcacttgatgagagcaataagcaataaaaacagacctgttaatatcagccagtaatgatgaactttagaagaaataagcaaaaaggaagtttaggagataattaagagaattaaagatgccttgtgtctttgcagtcagtgctagaaataatcttaatggacttttccagtgtatttacagtagggagtatgcagaaagtgatgatgcaaccaaatccaaatgtgcttcaggaaaggagtgaaatttatgacactcagtcattttttcctacagttaactcttggaagtccataaatcatcaatcacctaattaagactttcttttaaaagatgataaccagatcttcaatgtgtgcacctcactgtcaaagctaatcacaagtgataagactcactttctatgctggtcagttggtggagagtcaaatcagctgtaaaacaaccaaagtacacgcgttaggagagaggaatagcaacgaaccaaatatcctcaacctgaataacctccttgcaatggaaaagcaaatatggtgtaatttgactgaatattgattaaagctctaaaggtaatatagcatgatgggtaagcagtcaggctcaggaatcagaccgtgtggggttaaaatcctggttccaccatttgatagatgtttgaccttcagcaattactaaacccctttaagacttagtgctttcatctgtgaaatggagataatggtcatatatatctcatatagttgtaagactttaagaaactctgcatgctaagtggtcagtatggtgctggcatgtaagatagctattgttaaaatagttaaaataagtaattgtaaaaatgaaagagaaacatgatttcatacaatgatataaagaagacattaagtagcttacaaataggaatggagatttcttccaggggtaaataggcatgtttaagggggaaaaatttagtgcagacaacttactgtgcataacttctgtattaaacaaagatagacttttgtagcttctcagatgatagttttttttttttttttctacagttctttgatggcagggaggtaagattagggaactgtaggaggtaagtggcttcaaataactgtgaaggttaggcgttttgaaagaaagttctggatattaacactctggtattttctcaggagacatacttataagcatttattgacaaaagacaaagaaggttattttttaaatgaggaaatccttgcttgagtcatttggtgagttgcatttatacacatctttagtaacagtaatcattgaaatagaggaaagtctttgacaattaaaatcctttaagctaaaattacaaaggaaaattataagacatctccatgttctcatgtaacttttctcagtgctatatcagaattataatattaacttaaatgttcctatttccagattaattttaaaaggaaggaatactgtacttttaaaaactcatgtcactgcagtaattacagcctagttgtataccaacaaacacaacacacagggtgacttattgacagtatacaggtatactaggaataaaggatttactttcttgatagaaggctgtctccaggcctccagataaaaaagcatgaaactgaaatttcaaagaactttccagttgaagatggttcagagagttcctttgtataatggcctctcaagctgagattaaatacctgtgtcctgtttgccccaccttcccatcaaaatggtctcacaacaatcattctacgtctaacagcttttaataatcaacacccactttgtatgacttcttcatggaaagtggcagttttgctttacctgtttccatttggccccattgatgaatttttcaagaatatataggagcttgttcaattacgattaaaggactgtgccgagagaaaagaatcagtttccctttctagccttcttctctttcccttcaggaaggctcattaaccacccaggtgacttggttttctaaggtgtgaaatggaatgatgctgacacaaaaggagaatttgtgtgtgaaaacatgttgtaggttaaaagtgctctgaaaataaaaggtagcattgttaggagaacttctcagccctgattaaaatatggacaggaactgagtggtagcctaaggaaagcaatcatttgcctcctggatccatcagcccagatagatttgggtgcccagatgcttttctttgctgcttatacttgaagggcaataatagtgttctaggtgggtttcaagacagagggtcagtttcaggccttggtcagtgaatctccaagcccaatttgaagcctaattagtaggaggcagggtaagtgctagaagaggttgcacttctttacagcaaagaaaagtcattttcaaaggtgtgtatgttgtcattccactgcaaggagagcagacaccaggaaatatgttgtgatattaggacatcaagagtaagctgggaattgaggaaaataatttcatagtaaacatatggaataattggccagtggtgcaagaaatctaaatgaggtacagagacagctggacacttttatctcaagagagaaaggattgaaggatagagtgataaaccagggaggtggggtcgagataaacctaaagggaacaagcctgctggactaaatatcctctctctgctcagcaatttccaccgcggccatttgttaaacgcatagctgccatcttcagtgattatttccaagtaacatctatgtttctgaataaaaatccatttgaatctcaagtcagatttgccaggtgctagattcattgtcagcatttaatgtgctgaaactgccgatgctgatgaaatgaatacaaaaaagctttggtgagctctaggtgaaaatgcttctctttcagatcacttcctatgccagaaaaatcagtggccgtggaaagaggcagagatgccaaggggtgtgaatccaaccagccccatgaagtcttttgctaaactagagcattttcttgccgacagtcactcatgggttgaaataactgggcttgtgttagcagtagagtttctaatctctttgcatctctgtccagtttccagtcattctgtctccatggtcatataatcatttcttggagacctacaattatttctgagaagaaaaccaaaagaaggcggggaaagagattaaaagatgttaaaagaaaaacacacattattaatgtttaaccagagggatcgccctgaaatttaagtgggtttcattttgctctgtctacaggaaatgtaactgggggtaaccagggcattgacacatggcataccaattgtgaataagaggaagcattaccgtatcttcccattttacttcctgcagcagattcatgaaattcccacactgagccgaacactggatgtatttattgtacctaggcagctgtgcctccaatccattgcggtgtcagaccagcatttctagacacccttctatcttgtagagatgggagtaccatttccagaaatttagattcagaccaaatttgggcaagcagctaagactcagcaagagccttttaaaagtggtaaacaaaaggagtagagggggaaataaaggaagggaatgccagcgaggggactcaaaggggaggtttgctgcaatcctttacattcaattataccagctcctttgtgctttttcccttttgctctgcaaagaaagaatgaaatatggttttcatagcaagctggcagcattatctcaggatgcatatttctttgctgggttggaatgccaataaggggagaaaaaaagttcctagtttagaggaaagtacagtgctacagagaaaacacaaaacaacaaaaaaggaatgcaacaagtttctgaaacagttccaaaaaatgccccttaaagaaaatatttaaatgagaactttttggaagataaaatttctcatgctgaaagtaaccattttttgcagagtctctaaatatggaaagaaatttggccaaaaacgtagaccctttttgatatttgaagatttttagaattatcctcctctctttcattgatggagacaataaactccagacaagtcctgtgttaggcacaagcctctacctacttctgcacttcattataccagtatttggatgggagacaaagtttgctcaaataagtcctttatccatctcaattggcatgatctacatggtttctcaaagtaacacagaaacaaaagtctatatttcagtgggttgcatgatttaaaagaatgatattgacttagcgatttacttatttttaaacaggaaaaaagttgaagataactcattgcaaatattacacaattatcccatagcaactgattcagtaagtattcctagccccagtcacagatggataaagtaaaattgtattttaaaaaaacatttttttaaaaaaggaattttcaaattaccctctaacttattttctagaaggcagaaaatagaaagggggcttgtaaatgcaaaatttaaacaagcccctaaattagaagctattgaaaggaaggtaaaaagatagatcagaatataccaatatcatattgtttactttctctaatttttttactcttaaaaataagagtcttgggggccatagcctggttctgaatcttcagtcctttttactatggtggtgcctttaccagtaatttttttttctcatttcttccattacccacagtattgagtagtctttaagttctttccaaaaattcactctcagagaaataagtgctttatgaatagtctttagaccagatcctctttcacttcactcattcattcaatgcattgattcactggagagcagccttctaaaaattacttaattgagaatctgctctggtaatgagtaaatgtaggtcctattaacctcgtgatcttgaggacttgttttgttgttgttgctgttgttttcattgtgttggatttttcaagtataagagagtgagcatcggttaggtggcgcttcctggtgcttactccaggaattccgcccaattcgcgacactcagaattgttccctctattctctaaataaggaaaatcattttctaatctgcaaaattattagaaacctgggtagaaaaatacatagagccttactttgtaaaaaatattgctttctccaagtctttttcctacttcactgtttttactgtaattataatagaaaaccttgtttccagttttgttttgttttggttttgtgcataaatcagaatcgtcattgctgactgatcattcggtggagattttcagctaactcccagccctcatccagaatccttaattctgcactcaggctgaaacacatgcaaggttctttctcttttttcctttgcaaggtaaacatttagagatatgagatttccctgtgtctctagatacactttatcttttagataagtccctgcaggctgaggtttcaggctgtttaatgtcgacctcctaagttccaaacttccttaaagcctttagataagcaaccaactttagcagtaattactcaaggagtggatggaatagtgaattaatccccaaagatctggattcaaatctacttcaaaacccacacgtgaaaaatctctttaatggtcttggcttaatggtttcaactcaattcttgaggaaggaatgggtcttccttgactaagagtatcttgtaagaatgcctgctagagaaatcctttttccgtgattgatagattgatctcctttacagagatggtcacagatgtttgtatacttttacctatccagtattgacattttggtaatttcaaagtcaaactgtcttatattttgaacctagattttggatattagttcacttaaaaattataaaacacatgctacctttcttgatctctgcacatggttttctaaaattcagaaaaatacgctcttccaaaagagaagattctgattccagtagtctgatggataagcatactcaacctgcatgcaacacaatgcataaggaggtgggcaaaatagtcatggtggtggtggtagtggttgtggttgttgttttgatctgattctcatagttttctttgtcaatgcagttaaaaggatgcacagggattcttgagtgcccatgggcaaatttccttttcataaaggttgtagaaattagcaccatggaatttggtcacaggtttcctgggtgacctgaggctgggttagttagggtaaattccaaatactttcttagccgtgagttactaaatcctgatagtcttggatctgtgtaactcagggtagctctttgcttggctttgctcattgcaggtttcctgttatcctgtgatgttcccatggattctgtgtttccgtgtttgtgttaggtggaatgggttgctgcagaagaagaatggagggggagaaaagcagaaactgcctgtggaatagaatggcaaaagtcatagggattaactttccttgtgattcttttttcataatgaaattactgaagcaatgtcagtaaacaggaaacaagtgatgtgtaaaataattagcaccaaagggaacataataggttacttattaaaatccatagatggattctatgaccccatcaagtccagggaccagagatcacatgactccgtgtgccttttctgaggtgagcaccccaatgcactttgtcagcttactggcttctgacattaaataagcttcaggtatgatttattgagtagccttttgacaggagtgagaaactgaaatcttctagtccttgctgagccctggctctattctcattaccttctccaagtattacatttagtcaaccgagttatgtgtagttctgagagaatctctcctgctcccagaagtcattgttccactcataataaaattatgctatcaatttgccacaagagaaacactggagttcactaaattattgccatgtgttttgcactaaagacaaagtgataccaattaaaaaaacaaccacccctggattctatttttaatggtgtgcagggaggagcgagactggctggcaagggaggtcatgtctcccttctacacattacaaatttcattttccttaattagaaaatggcgcttatggagaatgagcagggggtttaagtagggaaagaagaaagaaggaaacctgaactgagctctaaataatatgtcagaaactgacaacttgcctcccgcaagactatttcatttgaaagatttgctaggttacattaggctcagatagattttcctggaaatggggccataacccacagactaaaaaaatgccccagttccaaagctctgcagataaggcacatccatactttggttccatctcagcaaccagtacttgtagctcctacttagggtaacattttcaggatgctatatccctagggatttgagcatctgttactatgtaagagtgtcatgtccttagattatccatgggaaccaatatcctgccatcgcaatttatcttccacttgattaatgaaagacttgccaataatttggccacagaaggaaagcttacccgtcccataccctaagtaagtaatgcctgccaatttaccatcaagttagtgatgaggtgaattcagaattttagatattataaataagtcaaatcccattacaacagaaaatctttatacaataaaaatttccagcccaggcagtagttcactaattttaaataatacttttaatgacacaattttattaagcaattgtgggcgagccccttgcagtatattacaatgaattgtatttgttctgaggataaacaggtacaatttcttgagaaaattggcacatcatggagatggtatgattttcccaataacaccagtaaatcattaacaaattaaaaaaaaaaaataaggacctctattgctagaccttcctagaaactcttccatagcccaatagcaacacttgcaaagacagcaaaatggatccaaagagaaaatggttctcctagacatcacaccagaataaaagtaggttgtgttttatgagtgacagccctgacctttggctctgtttccaaactagttgaccatctgaaataattgccagattgctttgggattttttttctgccttttatgtgacaaagggattattcagaaccgcagtgtataactcttagtaggtatgcataacttttcgttgggttgaattcaaataagctagagagtgggctggagaagtaaacatgcatgaaagccagttattgaggtgagagggtagctattagcatgcattttcttggaggagattagattggaagttagttttgaatcaggaagaactgttttagtagtcatatggaaatagtacgagagaccatggaagtagggaaattgagtaaaggagtctgggaggaaccagctctgcctgatgagagaaagacatttgcaagtgcacgaggtccagtgagaaaggctgacacccctgtccacagagctgcagcggggacagcatggaggaaggttcagtgtttgacaaaagacgatgcagtgtggtgcgtgaaagagaacgggctggacatcagcagcttgggtctaattccagctcaaacaacttgtgtgatcttggtcagtttagcctttctcagtgtctattccctcgtccataagagaatggggactgggtgatttttaaggtcctttctatctttaaaattctaatattttatgattctaagcctgtgaactgaaaataaaagtctagccaaagcaagtgagaggaaaaacgattttaaccattgtattttgaattgattagaacaagagatgcagaggccagtcgtggtagatgataggtgacttacacagaacctgaatcagagatttagctattaaaatgaagaaaaagaaaccgattttatctctattgttataactgtggcaggttttggtggctaattcagcatgggacgaaaatagaaaaaggagctacaactctgggctctggcccctgggagcaggggcttggggattctttccacaatgacagcagatctgagtggggcctgatggtttctctgggaagatgattttgttttcacaataggtagcataaaataaagatgagccctgtagggaaagaggtcagaataacaggaagcactgtgggaccgcacaaggggagggaaaggtaggtctgagggtatagatgttattgcagtcctgggagcagatgagctcatccagaaaaagagaggaggctttggtgacagcgggtgcttggaggagcttgggtcgcaggggcaaagccacactttgatttagagggtccctgaaaaggacataccatatctaggcatagaggaccttcctaaggcagaaagctatatagaaccaaatttcaaacatcgtttaaaatctccaactgtggaaagaccaactagggttggagaaaaaaaaagtttgacatctatttaaagcacaaaattcttcataaaaatggaatagtaggcaaagtaagaagcctgcctttcctcttgcaagtttacataggataataaatgagtaaactttttgtgtcataaaaattttgactcaaatagacaacccccaattttccatagttgtgagggtaaaaagtcttttaagagtgtggaattacatcatggtttttttttgtttgtttgtttctctttgtagcatcctgatccctaacaggtccacagcaaaacaacaacaacaaaaatcttcctaatagtatgttgttgatctggctgtggaaagcatagacattttgctgtgggtgagttccactctaaagtaatttgcttcaacagtgaccattcatacaattttggcttgtcactttcatagcaatttataaatttttaaaaggcagcagtagtgaaaaatgaaataccatcttataaaaagtatatcttatttagcttttatgtagaaactgtgcacagtgccttatcctggtattttgataagctgtttcttaaatcccttcttgcaaggtagatacccctattcagaagagcaaacaaactcacataccaggtcaaagttacatgtagcgtttcacaaaaagctattgaatttggaattattgagatgatcagaccaaatgatttcttcacccagtcaccttcatttgtcaaggttgtctagagtgactctagacgttgatattttgaggactgtctattttgttaattcctgaccaaacaacaagggagggacaaatttgagaatctgcaagtcactatacctttgctatttaaatatataaatcagtgggacatttgtggtgtacctccaatatcatatcccacctcaaaacacagtttaatcagtctttccttcacccactcactaaacaatctatttcctaagggcctctttcatgggttgcttgttcaccgtttgtgttgacatattgttattgccaaagttcatctgtatcaagaagtctttcaaaaataagcatattccttgtcaggtcttctcattggttaacactaatacagaggaacccttggatctcaaacaaatgctttttaatgagtttgaaattcttctgaaaacagttatcttttccccttgaatgcaatgaatgaatcatccttgttatccatccagtcctgactatatttggagaaatacatgaaaattgtacaatttcctcagaaaactgggcattcataataaaaaggaatagtataacaggttgagtcattttatgagaatatgttattttgtgactcttaaatctttatttaaagaagtgcattgaatacaatatcaaatatagtcagttcataattacagtagaactacattttataatacatctttcacatggttctcaggaacacattcctctaccaaaactcaattgcactcacttttggacaagcctgtgctcaggaaaggagaaatggttgtttaccatcaactttatagaaactgtcaaactaactgaagaaaagttttgctccattaagaaaatgcacctccctcaggagatcgagaccatcctggctaccatggtgaaaccccatctctactaaaaataccaaaaattagctgggcgtggtgacaggcacctgtagtcccagctactcgggaggctgaggcaggagaaaggcgtgaaccccgggaggcggagcttgcagtgagccgagatcgcaccactgcactccagcctgggcgacagagcaattctctatctcaaaaaaaaaaaaaaagaaagaaaatgcacctcccactccttgcaggcagaaactgtggtcgatttgccatccaagatcctgggtgcctgccatagtgcctggtacatagtaggaaactcacctaatacttatcgaataaatgcagacagagcaagtaaaatatttgatgtctgtattaaaagatgccctaaagggtcttatctgagcagcaaaaactgttcaatggtactaatgctttatttgcaggtaatggggaattcataatgtaaaataatattcctgtcaattctgaatagttgcttataaagtgaagctcttaactgagctaaatattggctaatgtaaataaaataaattataagtgggaaagatattttagataattgaacctaaaactctaattttatttaaaaaaaaaaactgagatacagagggggaaaatgattttctgagggcattagagataaagccatagtcaaacagatcaaggccccagatccagagtcatttctaatacaccacacactgcctccaaagttttttcatttcaattgttaaattatctcagaaagaaaaaaataatacattaaaggatgcagtatgatcatatgatgagcttcttttctacgtaactttatattgctgttgtaaccttggttttaagaaaagttaaagctctctctttcctgattattattagatttttgtgttcatgaatgttttgaaaaattaataactaagacactgaattgagatgttttaaacaaattttattaaatgaaatatttacagtccatccaaatggatatttgtaattaaaaaaaaatgcaacatttaaggaacctcaacaagtcttcaaaaaatttagtttgggtttgggctgaatatattactggatggcttttggcttaaaaattgctgtatgcagaagttggggagggaggctgaacaaaaacatcataggcacatacctagattatttaatgaaaagaagaatttctcctccgctaaaaaaaaaaaaaaaaagaaaaaagaatttctcaatctggaaaaaagataatactaactgaaaacaagctaccattggaaacttaacaaccagctaagtggctcccactaccatactgaatctgtgaccttggactctaaccaattatgaagacccagggcagcgagtgaacaaagcaattacaatgggagtcaaactattaaggagccaagagttcagtagctttatgtctctgccaaggtatccctagaacactatataataggaattgaataatattaacattcccacatggtagtttaaaacaacttacaatgtattctaatccaagcagatttttcattttgatgactatgggagtggttattttatttttagatgtacttttacaaacatctaaattgaaataactggtagcataaaattgccagtgatttagctggctatgaacttgtaaccacatacacttggaagatttttctttctccctttagctctcaggtaaatttcactgcatgacagcatttcatgctaggcaaagctcatacaggagatgaaaaagcatgaagcataacaaacatcacaaagccagtacaattacttgtttataaagaaaaacaaggaatgtaagataagtggaaaggtgcccgttgaacggtattttaaatgccttcaagttaaaaccatcagggatcagaaagcagaaggcaaattctagaggctagtacaccaagggaagaggctgatgaattgccttgtgcacgttttaattaaactatcatcttgagaattttttgtgtattgatttgcacagtacttaaaaaagcttcttttccccctacctccctcctttgaatgttaaagctttgtgccttcagcctgactctatgaaaagaaattactcatctttggaattgttacggaggaaaaaaaaaaacacaaatgggtggatatgttctcctctccttttcaatatgtttaaatttcaactgttcatataattatgctggcatgtatttcttcctggctctagtcatgcagaaaaattttaaacatgagaaattggacaactctaatgtggtgtaaaatctacttacgcattgtatttctttcaatattcgttaccaatagtatgcacattgttaaaattaaaagaaaatgttagcttttatgccctaatgcatttatgtgatatgcatagctgacaaatattttattaatgttgaaaagaggaagtttgaaaaataaaagaaatgttaaagataggggtggcttcaggcagaggtgacagtgacaaccatttaataataatcaccacttgtatcgcaccaattagaagagcactttaccaacaagacttagtttcctaacacccttatgagttacttactcttctgtacagagaagtaaaccaatgcataaattgaagtggttttctcaggggcttttggaaagtcatataaatagagtcaaacaaaaagcgttaggatactcaattcacaagtcaaaatgtgaaacaggtagtacgatttcactgttaatcccttctgaataagttaaaaatctgtgtctccaaatttccgccccccgcccacccccaccacacacacacacatacacataaatgctaaacaaatgggaagaagaatacttggcactagagtctgggattcattaaaaaggattatctctttctgaggtatcaatttctcaatggtctctaaaccatgcaggttatgtaaaaatgcaaaatgacttgatggaggagattaaaattccatgatgtagatggagatgtccttcctcagtgactagattctcaggcaactatacatatatgtgtatgggtatgtatgtatacacatatccagtctttgtgaatagtggccttgggaagaccctctaatttttagggcttttttcttagaccacagaccctatagaaagccgcactgctctgatgctgagatagtgttcctacttgttcaagagtgagttcaaaagtgagcctagccacctaattttcactagcagcacagactggaaatgcccagcaggattacagctttgagactcactctggagtacaacagactatcccgcccctctcagatcagaccctaaagtctgttctaaaattgtccactgtgggtgctgagagaagggggcccaaacatagcgtgtgtttcatgtcaaactaatgggctaccctggagagatttcagagttctcatttgtttactcacttgggccctcagtcaaggtctgatctttggaagagcaaatttttccaaattttgaataatctctttctagcaagaggctatgaattcctttgtccatcactttttggctactcggagccaccttcaacataccactcaaagcttttcctcatttaacaataggctgtaatatactagttctgaacctttgctgggtcatggacttctctgacaatgtaatgaaacccacatatccccagaggaatatgtacatatagacagacagaagacagacagacacacacgtgcacacacacatgcacacatacagttttgcccacaatcttagggcccttcaatggaccctctaacaattaaatccaaaaacaaatgaacaaaagccagcaacaacaacaaagaaacttcctattctaataagtttggtggaaatatgttaactaatcttaaaaaaagaccataatcactattcctcattttcttggtggatgaaatttaaattaattgaatttttaaaatggcaacagatggttctcactttattagattttaaattcataaaattatgagcaataccttttggtttgttctgtatggtacagccagggccactatagaggcctgagcactctgtacactgcacaattccagggcgcatcatatgcacagacaacgctgtgatcagcaccttcagagtcatgcaactcggcatctcttatcaatgtttaacacatggatattgaatggcaccacccaacagcacatcaattttagcaaaatgctatttcagtcattagcgattaagtctgctttggttataattattctcctctaaatggtgacttttttcctaacgtttatctctgtatgttaaaaaaaatatagtatatgtctaaacagccattagatcttaaagaatatcactattacacataaacttttcttccttggtgagcttcatgctaatagggattttgtgcactgcctttcagtgatttgtcaccaccttagcgtccctctttgtgaaatgtctgattatctgcatatctgtctattaatttgtttatctgtccgcctatctatagaaattttaaacggtgtaataactttaagaatagcgacactaatgtagtattagattaaaagaatgttactttatatgggtgtaaatgtaatttagaggcacttagagaaagctctatacttagcatgattcttggccagtggagacaggttgatcccactcattttgggattgctaatttgtcgttaattaggaagattgattctgttctgtgatgcataggcccaaccccatatgcatttttctggtttccggggcacttccctaattgccattgttgtttcaaatgtgcaacaatgtcacagggccttacaaaatagaagtgctttgtggcttctaaaaagcaagcatcaacgttgtttcaattttgttgtatgccattaagattatgctggtgttattttgaacaaacttctgcttcattccattccatattttaaaagttacaacacaaaagctgtattctgatttgaattttaagtgaaagaaacgccttggtagcaaaaattctttactctgttgtcttgaagtaatgtcagcctcagatacagtagtacacccatcaaggttgtgctattctgtacaaaacagcatttattttcaatatgttaactgtttgtttgtcttcccccatgatatactgagtttgctgctataggcttttttcttctctcctctcttggctgatgacaaattttaatcatttgactgtccttcacgacaattactttaagatgagttatattttctttattggaatgaagtcagggaatctatcaaaactagtgaaaggaaattttctaggaatgttttcaaacatagacattaggaatgggctgaaccaatacagaaaaaaatgtggaaacttgggagtgtgaaggaaaccacttactcactgcaattttgatgcctaccattgccaggcaggtaactcaggcaactttcgaactacgtggtttatttcagagtggtggaaactgggtaattaaaaacaatatcaaacccacaaagagaggtctaatttcacttttgtatttcacctgctatataatgtgatagataaaataactcatgtttgtacttatagaaagatgtgcgtatatatgatgagcatacatgaacagtatatgtttacatttaaagttagtgtcccagtcttgtatctttcctcttctttaacaaccttggtattttggcaaagctttcgtcattttttttgcttatgacttcagaaacaagttggaaattcttttaatgggctacttttaaatgtgctaaacataacctcagaaacaaaacaacaaaataaattaaaaacctagacgccgaggacatgggaatgaggaatgagcgataatgcatatcgctcatcgagggtctttaaacctatatgtttgcaccttgtcagcgtaacttacagctttaagtgcataaaggaagagcctttggttgtgcctttacccatggcttagtgacccttgccagcctcagtgacctctcctggtattactgggagttctttggtggtactttggcagctcctttttatttctgggtgacccttaatgttttatataaccattccttgtgcaatcagctctacatatctctgtggtttattctctgtggataactttttttttctctctctctctcttttttttttttttttttaagactgagtctcactctgtcacccaggctggagtacagtggtacgatctcacctcactgtaacctctgtctcctgggttcaaacaattctcctgcctcaacctcccaagtagctgggattacaggtgcccaccatggcagtcggctaatttttgtatttttagtagagatggggtttcaccatgttggccaggctggtctcgaactcctgacctcagctgatccacccaccttggcctcccaaagtgctggcattacaggtgtgagccaccacaccgggcctctgtggataacttttaatcctcaactgatttcttcttgacaaccgatattttctgctgagttgtcacctctgtcatcaatctctgtatgtttagaaaatccaaaccaatcctaatattagcccacatcaagtataattggagaaataggtttgctgcctccttcaaaaccacatattcagtctgcccactaatgttccttaagcatctaccattgcataaatacctgccatggtgccaggagctgtgctaggtgaggtctattcagaagtgggacaaagcggaccctctgccttcatggtgcttccagttcagaatcaaatgtaaatgacacaagtacaaaactattacatcagttgtttagaacttggagtgtattctccctgaagtttaatgttatagttatatgcagaggcccaaacatgcccacaaaagcctacacaatactctcgtacaaatttcatctcaaaatgtagggaaactccatacagttgggggagaaaataaaatctaaaatgagaaaaatagttgcatgcacaaggaagtttatactccatacccacaggtcagagcagactgccttggccagagctgatatttattggtctttggaagggagctctttcctttctggttcctccacttcttccttcatcttactgactcactacagtgaaattcagctgttgaaaagaatgagacacatgtaagtaacatgtctttaagttgagagatttcttatattgatatgaatatttgattggtaatatgtctgcaaatatttataatgctaagcgctagagagacatcagcaaaccagagttgcaaccctgccctcatggagtttccagtctattgaggaagacagaagagttatataattagttattgtttgtttttatttaaaatgtttataatggaataatctatgatcatttagacatgaactgtgagttattttattttgcttttctttctttcccttctttctttttttgatctttttttataagcagtgccactcattttccaagagcgtatgagggttaatggtgcagtcctcagccatccagaatgaaggaattggcccacaggggaagatagaagatactattttcaattggttctaactaagccaagaaaaacaatattgactgtgttctaatcataccattctttaaaaaatatctaagtactcttctatgttatctaattgttcctcagaagactcttctcaaatatgggtcacatctttttaaatctccacttatatacaagattaggtaacagagggtacataaactctctgacattacttagaagaatagtttgcatacacacacaggtagtatttggtactttttcttaaatcacttcttatgaagaggcagtaggatacagtagaaaggagagattttggaacataaaggatgtgagtttgcatctggcctcactattaactatcggtttggacctgaacttggtccctcagcttcctcatccatcaaactgggataatgattttgattcagaatattactgtgagaactgtatgacagttggtaggagctccaaaaagtaactcttgttactgttgttgttttaattgttgttatgtcacattttctgttctccgtctattcctggaaaaaccctgtacatttttctgcatatggtaggagattaataaatagcattatttaacagatagcacagaaagtgaatttcaggaatttcatactccctttctgcaaatagttcatcttactattatgcaacgtttttgtttttcataagatttttaatgcttttgatgctggagtattttcacagaggcattctgaaaataaagacaaatgcctctggtaatttgagcacttcatggcttctaaatgatggtggtttatgtcacagcaaaatggtcatgaaaaccagaaatcttggccggctgtaaatatttttttcagcagtattttttccttcctctaagcatttgtttatttatgttatttatcaaatatttaaatttaaatacctgagttttataatgtgtaccattgaggtacaaacagctgacaggatctattacaggcttctaaatacagagaaaatgacttattgtggacatcctaacacatgtagagaagggaacagacattattttcagagatttaagttaacattacatcccagagagagtttccttggtcacttcctctatagtctattgtttcttatattaaaatagaaacacgttttctcatccctccgactgtcatatttcttaaagatttaaaaaaagaaaaaggtgttaacgtcaagatgctgtgagagaagcaacacatctaatgaactcatacagggctcttgaaacagtacataacatctcctttcaaagattaacaaggtctgaagatgagaataaacaacatgtagatgttattttatggtaatcccactttgcgttagtttctttttttcctttcaccttattttcccatcagagcccttccttccttcgtttccttctgcccattcttgccttttttccaggttctctacctgcctccctcagatcctctctgtggaaacagttcaccttgcttcctcaggccacttatttctgtacccctggtttatatgctcccttacatcagacccccccatcatcactcatcagaccctctctcatcttcaggggggctagcctctcagcaggattggcaggccttgcaaatcttttggctgctgtaataaaatctccagttgctgagatttatgaggtcagatgcatgtagaagaggaagcacctacagttcatgaaattgtaaagaatgccaagcacatcggtaggaagaaaagatgcccaaattctggacagtttgtatttttgccaacctggttcgtgtttcccttaaatttatcatccaggtattgcaggtattcaaatggccaattcagatgctttttggagctcttgagatatccgtttacataattaatagaaatataccagcaggtgactataatgtgattataaagtacagtcctggctgttggggtgtattgaatacttttaaatgaaatatgtggagtgtgtgcacgcatgcaatgtgtttaaatgaatgcagcctttccaatcagccagaaagagagaaaggatgtaaattgctagcatgtgttgttcaaaatgcaaaagtaggaaagcaatattgatctgtgctttggatgtttatttacatcagttgcacagtgttaagatgtctggccataattatcaagacctgcccacctgtcaaaccgcaattgggttatttccccattgtcttgcagcagtaaatcttcaggtctggatgggcattagacaaatggaaaaaggctactttcccagaacatgtaattcattatggaaaacaggtgcctgctgaagatttttgctttaatgcagacgtattttattattcataaaatattaatgtgaatagtcaccaccagagtcgtgtgggttgttttcatctaaaattttcagttttaatgtgaagagagaaattgtaaggattctccaaaccttgtttttttgaaaaggtaaaaccattccataaatagtttcattcccttgctctcccaaaataggttccaacgaccctggctctgacttacataatgtacaaaaataagtctgctttaatgttgtatgcagtaggtgttctgtccagggacaaccttgtagtagggacagagtgacctttcaagaaaaaaaaaaaaaggaaatgaaatatactttcattttccagaaatatgcatgcaagtaaaaatttgacagcctggaagaacataagcaaatatatctttttatttgaagataaaaagaagcggggctggataggaaagggaaaaaacctgtgaaaaaacggatgatgcagtttttacgaataagcagcttaatgtatcttggcacccacagtaagccttgtaggagctcaaagtgcctcaggcaatctgtgagcagaatagcaattttattactttgtcattaaaccaatttcacagcagtattgtttgttaatgagcagcggcaaacgagcgaagatgtcacacactggaatagcagagagatttgtgacccaagctcacagcactaagatggaaagaccacggctataaaaaaggaaatactttgggatgaaatgcaaagtctatacagcagagcttgtgtttatgagctaccattttgctaagagctgtgagagaaataaaggtctggaaatatgcagttaaaacagggcctataaaattaaaaccaaattaaagtatagcagaggattactgcacagactgtactcgacaaaatatattttaagtgacgaggtgaaatctaaatcagttttgtttgaatttggttggtatttatgaaattcaataaaaaaaaatgaaaaaatatccaaacaaagcagccgcctcacccttgtgtggtctctgagccataaacgtgcatcactttgaggaaattcaacttgccaatccttaaataattagcaacttcttgattcacagggtgcgcccctccatcttcatgaaagccttctctgttactttatctcttcgtaaggacgttgcccatgtataataaacactcaggcggagccctcatctgcctgaggctgggagtcaagtgcacctagcaaggctggaattgagctcatcatttgataggactttctctttttttctccttttttacttttctttttctctttttctttctgttcctgttttgtttttgtttttgtttttttgagctagggctgcccttacaaagaacttgggagacagccttgagggatacaagaaacagtgccagacagtcactgcatccctgcaaggcgtcccgaggtgagtgtgctgcccgggcggtcttgcagtgctgatgcgcaggaagaagtagttcaggccaccagttctggcatcagactcacctactccagaagggaggatggggtgaaggtgggagcctgagaggaaattaaggaaggtgatgatcaatccataactgtatctccgtttgcaagagagattgattagaaatatttctggttgtcacacttgctgcggagacaccccacttctttgtcagggaaactcatccatttggagttgagactgacccgatttgtggggcctagatgctaaaatgtccagaattgtgcagggattgattccatgggaaagtcccagcaggtccgctcccgtaagctcacagccagtcatggtcaagttcggtgcctcgtatgctttgaggttcgcggcaagtctatgtagttaactctcataacctttgggacgacaggccagtcctcactggcgccctttataattcaggttggctgcctatgtgtatttcatatttttctctcatgaccccagcttggattcttaaggtctttatgaattttaaactttggtttggttctattgttttctctgctttcttttctgacaaaatttttaagtggtttttggactgatttggtgaaagggaactctgcaagaaatgttcatgaccgcgatctcagccgtgcacacagtggtgggagttcagctttaagactgttttctgcctgacagggcaggacccccagacaaatcactggctggctctgtggtagttggcagccattcaagactggtcttgtgccaggagtattactagatagccagacagatcaattcacttttatattcccgccattatttatagcccactgtatatctactcttgcttatgaagtaatgattagcaaatacagtacacataaaacatgggcatttgttctggaaagggctttctcctgctgatattgcagatagtttcacaggtcacagaaccttaaaaaggatttaaagggcatgtcttgtgtagcatttgttcctttgaaaatgatgctcctttcccattttttagtaattgaagaggatagaaaggttttctcattgcttacgtttcactgaattctctgcagccccttttcccacagatgtttcagccaaacctgtatggagggaggtgacatggcatggcttgctgtttaaaacagctacggtattttgtgcttcccttttgagtgtgtcaaggtgaacaaaaggagagcctctagaacgcatgggagggaatttgggacaggaccttttacatgctgggggaaactgacaggactcagtgaggaaagacttttgtttgtgttttcttctctctctttctctgcagagcgcatgatctatatcaacatgcttcctggtcatactaaagaatctcagctagtggtgatctaccagtttctgtgaggattattactgtattaatgcattttgggaggtgttcattcagttcagagtgaatgctttggaagacattgcacagcttgaatcatggggcatcagggatagcttgacttttcctgaaggatgtatggtggccatagactagttggttggaagcttgcattctgtaagcctggtatcaaatgcacacattaagccatgttttcctagcagaatgaacatatatgacaaaaagtaaaaagaaaaaaaaaaagctcagaaccttagaacaggatgatatcatcagaaagaataagggaaagtaggccagaattagaaaacatcaagatcattggaaaactgctatacttgcattgcttcctccttggttcattgtacaatggccttaattcaggtgacattgcaagtaccttttgtgccctccagaaattaagcgcattttgtattgtgtgtgcagcttgtttttcttctgttgcagcagacaaaattgtgacatattattgctaaggagattgacaactcataagaataaatattgtctgtgggcaagatttttttgtttgtttccagagaacattattaatttcagattatattaaagacttacatggcaggagactttcttctagataactaaaaacactgcgtagaaagttatactatgtttggccgggagcggtggctcatgcctgcaatcccaacactttgggaggccaaggcaggcagatcacaaggtcaggagttcgagagcagcctgatcaacatggtgaaaccccatctctaaaaaaaaaaaaaatacaaatattaggcgggtgtggtggcatgcgccagctactcgggaagctgaggcaggagaatcgcctgaacccgggaggcggaggttgcagtgtgctgaaatcacaccactgcactccagcttgggcaagaaagagcaaaactccatcacaaaaaaaaaaaaaaaaagaaagaaagaaagttactgaggtttccaaagggacttacagaatttcatacagaaaacaggagtagaggtagatactcctcaaggactttttgttggtttgtttctgcccttttagatgaactcccgtaaaatgtaacatttaaaaaaaaaaaggatcttagtagttaaaacgtaaaatgaggtgaaaacaaacaaacacacacacaaaaaaaccttttgattctgtataaaaatacctctttaccacactatcttatattttatagccctttacagttttcggggcacttttatatatgctgtctcacttgattctcacatcagctctgtgaagtgaacaaggtttttccctttttacaaatgaagaatcacagactcttccaggcttgagggcttgttcactgttgcaaagctcctcggggtcagactggaactaaacctttaggttctaacagaccaatgctctcccttctactccttccagttcttttctatgtgctgcgttatcctgtggaaagagctcagtttaattttttaagattgggaaggcaaacttgccagacaaaaatgatatccctaagccaaaatgttatttaagcatattcatttccatatcagtccacatcagtgaacatggaagtccttggatactctgggaatatctcatcatgtctgaccttggagggtgagatttcccacacggaagccctcgtacgtaagggcaaactaagtcgatgtttaaatcatcatttggcttcctttggtttctctttatagctgctcttcctcgagccttccaaccagcacttgagtctttgtttcttgttgttttagtgccgactatctaaatgtagtcatcttgacaggaccactcacatttcatttttttttttttcaacaatgccaagaggtcactagcgtatcaggctccacactgtgttttaagtatggagttatgctaagtggtgctgaaacacaagctctgggaacaacacaaaaggtgggggcacactttgggtgaaccaaattctttcccactttggatcaggagaagacagaccgacagtgaggcagaaagcaaccttcaactcccaaagttaaaatcagagactactaagcgctttggtgtttttccttgaaaatgctaggaagatcacttccttgaaattatttcaaaccacatgaaatagcatacggtatcaggaaaactgagtctgagtatagttaatgacttctaacacaagctgggtggctgtcccttgaacagaatgtatgtttatgcttcatgttctattggaactgatcatttcgcattttcttttccatgctgcttcttttggtcctgtgattgatgtaatcctcagggtcacatgggctgcctctggtcaatcctacatatttcacaggcatcacaagataccttttcttggtgatacctatcatcaaggcaaacatctcattaaaaatttatccaaggtggtttggcagctttattctacaggggctgcatcctagaaagctttatatgccatgtttgattaacaaatggagaatttactagatttatttggctcttcgaggttaaaaatgaacaacagaggtttttttttgtttttgtttttgtttttgttttttcctggcccttctgaaacctttggggtgtgcttttaccaatagaaaacaagatctgttacctcccggccgtgagcgctggttaaatttcagcttccacccatatttgtcagactggtcagttccagtctaggtaaaggatgtagaacaacagattccacatgacttccatagtagtttttctttttaaatttaaggacttgattactttataactttttattgttttatcctcagaacacaggtgattcagagagtatagttctcatacactaagtcaagactgtattcctactgtcttcatttggtgaaaatgagaaataagagattgttatctgccaaaggaagcatggaggtccattttcccacatttgtgatccgtaagtcatcatcccatgtgggctcaacttaaaggatttttagcagacctgtttttatttatcagtgaaacaggttctgcatcattctcccctttagccttctaagatctctaagaattcttttataaaaagaaaaaggtggtacctgaagatcagtatagaccgggcgccgtggctcacgcctgtaatcccagcactttgggaggccgaggcgggtggatcacctgaggtcgggagttcgagaccaacctgaccaatgtggagaaaccctgtctactaaaaatacaaaactagccgggcgtggtggcgcatgcctgtaatcccagctactagggagactgaggcaggagaatcgcttgaacccgggaggtggaggttgcggtgagccaagattgagccattgtactccagcctgggcaacaagagtgaaactctgtcaaaataaaaataaataaataaataaataaataaataaataaataaataaaagcagtataggttgctaagtgttgctgggactttaatctccagcctccatttcttcttgtttttcttattccagcatcagtatccatgctccaatgactatgtagtttaacttccttcatccttgacttcaaggaacaataactagaagggtatgttgttcttacgtgcctaaatatttggacgaataatttgtgagctctaaataaagatccacctattgtgtttatgctcatccatgtcagtggaaggagaaaatgatactctgaaagacaaaatctagcaagatagcttaaaattcaggctatctcacttattacttgctctatttcatctacattctaataatgggtcattgtagataaaataccaagtgcaagtcaataacacaaattttaatgttcatcctccaatgtttaggtgattatagaaattagtgctatgactggaccactgtacacataaactagccactaatcagaattcttttggtaatattgaggattttttaaattactgtttccaatttttttttttttttttgagacggagtttcactcttgttgcccaggctagagtgcagtggcgcaatctcgactcccacaacttctgcctcccgggttcaacagattctcctgcctcagcctcctgagtagctgggattacaggcatgtgccaccacgcccagctaattttgtatttttggtagagacagggtttctccatgttggtcaggctggtctcaaactcctgacctcaggtgatccacccaacttggtctcccaaagtgctggggttacaggtgtgacccaccgtgcctgtccctccaaaatttcttaagtacataaaacattgataatatttgtacaagtatttgtccaaaaatttatccaaatatgcccattatttggataaatctttatttatttatttatttttggagacagagtctccctctgttaccttggctggactacagtggcatggtcatagctcactgcagcctcaaactcctaggatcacgtgatttttcccacctcagtctgcagagtagctgggactcaaactcctaaactcaagcaatcctcctgcctctaggcctcccaaagtggtggaattacaggcatgagccaatgtgcctggcctaaaatctttaatctttacaattacgaggtaggtatcatctccattttacagatgagaaatggtgagtcagagaggtcatgtagctgagaaattgcaccagcagaattcaaacttaccacctaacttcagtccggtaccttttctactaagcttatgactaggagtacttgctctatctgtgcatttacttaagtagttttctctatctggtatgttctctctccttctgtccttcccattccctcctgtcagaatccttcaaggaagggcccaaagcttcctctcctcctcccgctctcatccaggttatctccaccttttctgcacacccatggccactcttctggcattgagactctttcatcttattgcatggttattgctttaccgctaaactccaacctttctgagagcaagactaaatcttcttcatccatgtatgccttgcagtgtctacaggattgtaagcattaacatttatttgtagaattttttaaatatgtttccttgtaattctcacctactgttctgatgtctttacaatacaaattggacttcacattgcatcttcaggttaagtctttgaagtagactatataatttattctcattttacatttgaggagattaagccacagaaaagttaaagaacttgtccaaaatcactcagtaagagatatagccagagttcaaacccagatttccaaatcgcatagtcttcattaaattgtgctgcctctttcatcacacaaaacttaatggatagagggctgtatgtcttgtttctttaattaaattcagagatccctaagatgtgaaattaatcccaatcttagtgctttttttatttgacaaatgtggcttgttatacagtctcttctctatttacttcctgataaggtccttgatgcaatgcccagtaggcagcagacactgaataaatatttgttaaaggggatcaagaattgtgacttctagaatttctgcaggcaatcaaagattattaataagagaaaggagatgaaccaggggaaccagaagaccatttgaaggaagataatggaaaattttcttttaggtgaaatagagatgagataagcaaagcgaggctaccattttgaaattctctctgtgtgtaaagaattcctactcatgtctctggtatggacttctcaccattgtgttaatttgcttcaagtgttctcttgcttccctctgtcattgaccctgaaactcttttaggttgtgttcagtacaatgatgagttagtgcccttaggtgacattttacccaggtgtttccctagagtatgattggagataaaaatctgtttaggatttcctttgtaggacaattcaagaagtcggaatttttaggacagttacagtctgcatttaaggatcctgatggacaggctgaataaacaaagataattcaaatttcaaaagcactattcatgtataacccttagaactgatgaatgagaaaattagcatgggcctgttgaatcaggttcagagtaaaggcttactttcgtttatttttttcctcaccagctggaccacattcccacactaatttctcttaattttgaagactttaaaatgccaaccactacagaattccatgcacattctatgtttttctatattcttccttagaacctactggctttcaaatttagataagtgaaaagttctggtctataacttttctagagatgaagtaatttccaaggctccattttatgtgtctgctctaataattggttcaatttctctatctgactgggaaatagcggataaagagtctgttgggtttaagatagcttgtgatccggttgctgttggttcccagaaggtctttcagctgcaggcctctcctgacaagacaggaaaaacaaccctaaatattcctaatttcctagcccccaatcatttgcacgcatgcgtgtatgtgtgtgtgcgcatatgtgtgcatgagtgtatctgactgccacttctgccacttactaactggtgaatttaggcatattatcagattttgctaactctcagtttccccaaccagaaaatggggatgccgataatgttatccactccatagggtttttgtgagaatttcataagaggatacatgtatgcattcagtttagtgtctagctcaataaatgttaattataataatatggatgaaagcaagttatgaattatgaagcccccttaaaaaaggaaattttgttggctgtgcgcagtggcttacacctataatctcaacagtttgagaggctgaagtgggaggattgcttgaggccaggagtttgagatcagcctgggcaacatagcaagctaccatctctacaaaaaaatttaaaaagtagccaggtgtggtggtgcacacctgtagttctaggtacttgggaggctgagacaggaggattgcttgagcccagaagtttgaggatacagtgagctatgatcacaccactgcacttcagcctgggcaaaaaagtgagaccctgtctctttttttttttttttttttaattgagatggagtctcgctccatcacccaggctggagtgcagcggtgcggtctcagctcactgcaagctctgcctaccgggttcacaccattctcttgcctcagcctcctgcgtagttgggactgcaggcgcccgccaccacgcccagctaattttttgtatttttagtagagacagggtttcaccgttttagccaggatggtctcaatctcctgacctcgtgatccacacacctttgccttccgaagtgcgaggattacaggcgtgagccactgcgcccagcctgagaccctgtctcttaccacaaaaaaaaaagaagaagaagaaaaggaaacttctttaatgtaataaaattatgagcattaactgacacctgaaatttttcacctaaaatatacattagctaccagagttttcactacatgtttcactttttctccaagtcagaatttgatggactgtgtagtttagaagactgataacccaatagagcttgacaaccatctatgccagattttctatagtgctaactttaaatattttgttttgctgtcctcctaagcatcctcatctttacaacatttgccctgaattttggttcagccatggttatcatagtaagtacagcacatacttccacttgactcaatgagccctatttagtcaagagactaaatccaggtcagattcatggactgtttgcttcacttaaatgaatccgtgataccaccattcataaatgggaatgggccaacccctgctggcataatgatcagtgggaggaggagtgggttgggcactgagcagctgacgattctccttacttctggagggggcccttgagatgacagcatataggtgggcagggcaaggcaactgtgacacctccctggggtccttttggtgccagggatttacagagcctcagctgtcaaagaacaataaattttccttcaaaatataaaacataaatcagtgtttcccaaacactgaaaggcaagaagaaactaaatccccataataatgaaaagaatcctgttaattaaatcagcaaggtagagagcttccctcctagcacacagcccagctgaacagtagaataccttggagactgaaactgaaatccaagctttttctaggtttcaagccagcatcctgagggaacattcaggagaaaaaaataaaaatcttaataacaggacaagtaaacacaacttttttttttttttttcccagaagttgtacttggactatgtttatctgggaagggaagttgcaaaacaaattgtaaactaggctcagtatatttgtgccaaccccttatcagatttgcaccagtcacggagaagctgaaggcctgttgctgagaattaaaatgcaaaagaacatacacaggatacttgaggaaaggagagagagatttcatttcttctgattatttgtttgtttgtttatttcagtcatagcctatttcaatttatttggctcctgaacatcctggctcacgttgtttataacaacacgtgttgacttcacacgtctttctttttgtcctgcaaagctattggtatagatttgtggggttttttaatgcttggttaattggctagccttctgcgaaagagtgtgttgctgcggttgaggaaagttggaaaaaaaaaatagaggttaaggtttcttatgactctgtcacgtttgggaattgagggccatataatcttactaccctcaagccactgatagcaatttctattcccatcagccagagccctcccagggatgaaagccacaccctctcggctccacttcagcttttggttttattctccaggcctctcagaatcaagtcactttcccccatcctctactaaccttcacatcagtttttactgccagagggagcacttttcaaatgggaaactcagaaactgagacctcccttcagaacctgtccatatttgaaaatgcaaaaactacccaactctcttctagacctcagtatttaatctttcacgtagcaattaatcacataccagttgttgcattaacatttttgaaaagtatattatgcatgtcatgggacatatttgcagtatgccaaagttcagtccgatttatatttgcctacagcagagatgtgtcttgaatactctggcacaagagttttcttattatcatctgtgttctccttggattcttacgcttctccatcttcctttgtccagttcataaccacacatgtacatcctcagaaagatcattttcagtactgttggtggctagtgctgctcagagaccaacagtggggtgtaaatttatattgataagtagaattggggccacagctgcaaggttgccaacccctcagatcccaccataccaccaatcgctttgaccttggaggtgaggatggcaggaagaaaggaagtggccaagaaactatggctcattcctagctcttcataggaagaacaactttaagtggcagcaagtggacacaatatgatatcagtttagtttgattcttggggcaaagcaaaacaagatggcggatcccagctcagttccaagagcttctcttccatgacctcagctgggttgtgtatcatggtctgagttcttttccccagggtgtatttttttccttctgacctgtgtgcttaggaggaaaaaaatctccttaagcttttttttttctccccctgagtgtgtgaagtcaagtgggatttaaggtcacaagacacatttgtgaaaaataggtgcatatgtgtgtaaattcaatgtatgtgcatgtaggcatattgtaagaaataagttttgaggtttttaaaattattttttttactctgttctataatctttcccataggactttaaggaaatagttgctttaacattctgttatttggaaacggccagtaggtgatgtaaaagctttgtttcattggtattgctaatgaatgtcttaagtcacagatatatgagtggctattaattgaagtggaatacctgtttaagtagaggctgttaactgtttcctaaaggccaaaatctatgcttgtttaatggagaatcaaactaagtatcaatgttatgcaggtccaaaatgtgtgtccaaatttcacttttaattttttaaaatataaaaatataatctgcaaccacatctatggattaacttgaaaacatcacatagctaacatttattgagcatccactctaaacaggagactgagctaggcgctaagaaccgagtaagtctgagttggatggtagcagtaagcagctcattccaaatgtataccaaatttaaatattagaaacaacagtatagttctgccttagaatttaaatataccctttgtgttattttgtatgtccatatatggtataactgccaaggagtttttcttctgctgtatataagtttttgagtgattaaccaaaggcaggtgcggacagtggaaacaagcactattaaaaaccttcaagcccttccacagcctgagggacgggtacaacacacagcaccattttctgtttacactgacatcactttgacagtttagcaccttttttttcttttttttttttttttcaggagtggggggtgagtagcaagtcttctgattaggaattttcaaagacaaacttacaaacagaagaaataaagtttgcattccttcatatatttagatatgacagattaaaagcaaagcaggtatgcagagcatgtttaatctctcaccaaggtggcaatctccaaatgctttgatgtcgcctcattgcaaggcccctgagacttttccaggaaccaaattcattgactttatgtggcttgcccatcccttctggtgttcaaaaaagaaaggaaaaggtccctgcaccttcttgcctccttcctttattgtacagtttgctttgtttgtttgattttaaaactgccattatgtgaaagtgttgcaagtataaataattgagaagataactctgtagggaaaccacttttgctgcctttgtgcaaaggcagctcattacggctctaagctgcagcattccataagagcaattatgcaacatcagtatgtcatggatattaaccaaggggagtagataagagataggaaaataattttgtaacttatttaattaaatgtatttggtttttcaaatagttcctcttgtgtgtaatttacccagccactccatggttgctgtggtctttgcaggactgttgtccagcatttgtttttggcattcctcctcacttttgtgtgcacctaaaatgtatttatattggggtttaatttccacccaaggagaggttacccatgaaaatggaaccataatttggtcatgaggtttttttatcccccctagggcttatatagccagttaatatatgttaatacaacaaagtgaataaaaggttaaataagtgggtcaggctcagaacgagtcctgtactgcttacttctgcttaaacagaaggaaaagcccataatggcgcttgcctgactttcacccccatcattttaagaattgctttgccaattcttcacagcaaatagtaattttaagtggaccaaaacagagctcagggtgtttgcactccatggtaataatagagtagctgtgctccctggagtcaataagcccaacaattgagtcatttttgcctcctgtgagtgaatcactgctgttagcctgaatgacaggattgcttatagaaccagagcccttcgccgggctgacctcatctcgggacagcgaggttcagagggcaggcaggtggtgtttaacacagttataagtaaaagctgattttgtacttgtaagctctgtaaacaagaaagtagaattgattgggagtgtttgatgtacattgctatacattatccaaagcagcacttcctcttttcctgtctctttcctcttctcatttctccttcctcttaacattgtccctacctcctcctaccttctacatgcatgtgtctccaacacatgtaacagacatgctaaagttagatggccacacacagctcagtcacagttctgattaatgaaacatccagaaggtattgaaaatatatatgtatatatgtgatatgtatgcatatatatgtatatatacatacacacacacacacacacacgttattcttaagattattcttcggtttcaaacagctattttgaagcagacattttaggcatagtaaaatacccaatgatcttttttttaaaaatatttcattgagtaggaaaaatatgagaaaagtaaggaaaggaaaaggtagagaaaacatttaagcctaatataattccctaataatcaaattacctttgagatagaaaagttctttttttttttttttttttgagacagagtcgcgctctgtcacccaggctggagtgcagtggcgcgatctcagctcactgcaacctccgcctcccgggctcaagccattctcctgcctcagcctctcgaatagccgggagtacaggcgccgccaccatgcctggctaattttttgtatttttagtagagacagggtttcactatgttggccaggctgggcttgaactcctgacctcgtgatccgcccgcctaggcctcccaaagtgctgggattacaggcgtgagccactgcgcccagcaagagatagaaaagttctaaagaaccttttcagccacagcacattttaggggtcaaggtgtcatatttggggtagtcatggggtacttatgaacaggttagatataaacaagagccctacaagtggttcttcatctctgaatctgacttggggaaatctaaagatggaaagaaagcctatttttaagttgataaaaggcttaaaaatataatttatgttaaaaattaggatgccgcttcattttcttttcacatccttggaacccgagtgcccctcaaaatctgaacaactagagtcaggaattaatttgtaccatcaccttctcttggagatctgtaatatatatcactctattaaaggctgtgacacaatctgcagcagagaaagtgacttcactttgattaccttcacatttgttttctccatatttttttgacctaggcccctattctggggaaatacctattgactagagttcctcagagcacatttgggagcaaaatgtgcttacaaagatatcagaaaaaaatatttttaaaaagctttttgttttgggggttgagacaagttctggctctgttgcccagactggagtggagtggcaccatctcggctcactgcagcctccacctcctggtctcaggcgatcctcccacatcagcctcctgagtagctgggaccacacagatacaagccaccatgcctgactaatttcttaaggttttcgtagagatggggcttcatcatgttgcccaggctggcctcaaactgcgcggctcaagcaatcctcctgccttggcctctcaaagtgcctctatttctcctttgtctcctttcctttctgagtctcacaaatcttcctccttcgctttctattctctatccctctctcctaacaccccccacccccacccccacacacacactcataacacctcattgatctcagttctcattcctctccacttgagtcaactgccccatcatccccagtacagttatgtcccggactgtgcatattgcctgccagcctagaaaagccagaggcccaatttcttccaagtcacatctgcacccacgatttacctggcctctctaatgcccagatagattcgcacctttaactaatacctctagtctgtatcttgagttgtttgtgagtacaaaaataattagaccagtgccagaaagcctgagttatttcccaccttagttctgtcccgctccagggcaaatcatttcatcaaggattcagctgtgcctcttataaaatgagaacaagaaaatccttaaactcagggctcttttattctcaattctaagttatatccgagatgaaggaaccctattttcattcactcatttagttattcactcacaaacattttattgagggtgtactatattcctgacgcagtgtcaataataaaacttaagatgtggcccctgctctctaaggctatctagtaggaaagtcagacgagtaaatcacaattgtgaataagtactgtgttgggcatattagctcggtgccactgaggaagtgcttcttaatcagactttggaaccagggaagttgcctcaaagagatttctgtgataagcactttgaagggtgtgttagccagatggccatagcagaaagcccagcccaggccaaaggaatagtgttgtcctggttagttagcacattaactttaaaagtattaattgctttttgtttatttgtacgttacctgactctaaagaatctgtggcagttaaaccaagtactaaattaaggttttgttgttgttgttgttttgttattattattattattattttgagatggagtttcactcttgttgcccaggctggagtgcaatggcgccatctcggctcaccacaacctccgcctcccaggttcaagcgattctcctgcctcagcctcccgagtagctgggattgcaggcatccaccaccatgcccggctaatacttttttgtatttttagtagagacggggtttctccacgttggtcaggctggtgatccgcccgcctcggtctcccaaagtgctgggattacaggtgtgagcctccgtgcccagccaagttattttttgatagtgttgctactttatctgcattgtgaaagtggaaatagaaaatagaaatgccatcatttctatttctaaaaattaagttaaaccaccttaggaaattctgataggagatgtgaaatctgaatatgctgtaaaaattctttcaaattgccgtacagtgtgtttgcttttttgtctgttgtagatgacggctttgtgggtaatgtcagaatcaaaggttgatgtctctatttctcacaaatcggggggaaaatccactaactaaccctctaaagctaaaatatttaaggactaaagcagatgtggcataactgctggtttgctaggtctcttgtggtttataaagatatattttatgtcttttatgattacgggatgatgccgaaaattttgggggtaataataccgtcacattggaaagactgcgtataacatctctggagaagatacagaatgccacccggctgtcaaatcaaagtaaaagatgtttaatttgtcattaagaaaaggcagtcaggaaattttatttggaatttggtctttgatatgtgaacatcataaatgtgaggatattaagtcatgtattcatgaatagattttttttttgctttctgacataatataatatgttttcataataatttttaaagctattgttagatgcgtagctgttagaactataatttatttaaagtgagttttaaaattgtttagatctttgatttttttttccccattggcacctttactagatgccagtataaactggttaaatagcatttggtttaaacagaaagaatatacgtatgcatatttatgatattttgtttgttggatctttttcttaatattacttgactttctgtgttttaatctcattttttcatattttgggttgaagccactctaaagtttaacacctaggagatttctcacttatggttccctttaaaagtgctaaaatctcagcctctcaaacaagagaccaagctacaatttaaagaaagcggtggtattgataaagggccctaagaatgttgccaccttccaaatgtgtcctctgccacatcctttcttttaaagcagcaggagaattgagaggaggataagagcctggtccatccaaacacttctggcatgccaatctggtcttctgaagtatcccctgctgctttagaaaaaagagatccccagacaaatgaaaggcccacggggacattcacatgcacagcaccttccctccaagtggctttagattgccggtgtgttggggtggtttggcctgagttgaagaatagagacttgagaaccatttgtttccacaccattttgggtgaagtgctatatttttcaccttaaaagcccatttaaaaagaaaaatatggtttgaaaggaggacacaatttggaagccatcacacttaatggaggcccttttaaatgtaacactttgtcctatcaattctcttctaaattagttgtcactacctggagaaaacccacccttgattgttttatgctattgcttaaaaatacatagtcttttatatagattttcctattccagttttaaaaactctctgataagttccattactaaacttactttcgttaagtaaggagtggaacgtaatttgtgtagcaacacccagtgtaacatgtatgtaattatcattggcctctaaatctagttgcacaaattaactcaaaatgtaaagaaaaagcgaattggtcctattagaaacaaggccttgaccacagaggtttttactaacaatcgacttggccagtcatggtcagataaagaacttcccaaaatttacaggataatttggaagaggaaggaagtaatttttttggaggtagccagcaggcagtttatcctgttacctactcctgcagctctggaatattcatgtagcttggaaaataggaagaaattagacgttttgaagttaagtccctaccttttgctcttcttttgtccttgttttttttttttttttttttcttgagtggctgacatactttgtcagcctgaaagtcctattgtcaaaccaaaggtaacatttgaaaaattgagtttgcctcttcccaccacaacaaataggaatttctcatctatttccaattttcatcaactatacaccgtaacatactaaacataaattctcagacttatcctcttaatatcttttgtatttgtatctctcctttttcatctaagtttaatttatcagcagttctcccaaccaaataccctacttctttttcatttctaccaccttaatcagagctcgttttgtttccctcttctgcctggattggacaagaactttccatcttctcagcttctagattctcatcagttcagttcatcctatacatagctcttggaaagatcttcctcaaacaccatattttatcattctaccatttaggaatttcaagaattcaatttatcactcaagaacctctaccagattgcgtgttaatcatagccatgttttccagatcgaagctgggagccagtcagagttcaattcctttatcctcccttgcacaacatcggccccggtctggactggtgctttacagcatgccatttccttgttttctcttcttccaacattccacgttcttttaatctgcttcagctttcttcctccaagaatttgaaattaatctttatctttaacttctttaattgacttcatgacacttatttactgactatggactattttgacttgtaattatttgtgtgttctccaattgtgattttcagtttgtttctgtgggtgtggaaaataaaaatctttaaaggcataacttgcattttcatatatatggagaaagaaactcatataactatatatgtatgtattgataattttatatataactttgtcttatattctgtcattaaatttgtcttatgtgaagtatagaatatggaagatttaccaatgtgtgacacatagatagattactatggaccttaaaaattatttggtctaattttttttaggattaaaacaggatgaaaataagccttacattatatctgctcctttatacctagctttaccttccgccctcttcccatgccaaacccagtctctcattgggaaacacacacacatgcccctagagaaagcatctatgaatacaattctgtgaacgtggaggaggtaggtgattagtaacttttgactggccaaagggtgatgtaggttaaagcaagaaatgagggtgagaaaaatctctgttcccctagatagaggggaagggagcaaacactagaacatggcatgattgagtataatagaagtgagaatgtttagcaaccattcttttctcctttgtttctggcatttccacccctccccaccccccgacaaaattcctgtctttgatctatgcagtaatatgtctaaatatcctagaattggtaactctgtctgtatgtatgtgtgtatatgtgtctgtgcgtgtccttatcacccctacttcagcagcagcacagaaaactgagccaggtgttaatgaattcatctctggcaaagtttattgctctgtgtgtgtgtgtttccatgcatgtacatgtgcacacacacacacacaatacacatacatatacctacatacatgtggctgatgacttctcacagtgtatctcaaagcattattgcatgtcccacttggttgatagggcatctctagcctgacagatttatctgttgagaacaggattatgcatttgaaaccagtttaattcttagcaagacaatgcacatgtcttatgtagattttgttgttggtttttttctccttcgtaagttactcggggaaagtcatgtcaatataaatcagtggtaatgaaatcaacattatagcatctttgataatgcatttgctaaagcctttctggacgtttacccagctctcaatgattgatattacaggcagtggataaacatttttgatggatctgtttgctcacagataaaaaaaaaaaaagaagaaaatgtaatccttttatctctttgattcaaagagtgtaatgccattggaaaggaagcagttcaaatgtggtcatcataggttggtggcaccaaaaatagaaactcacttagggtaaaatttgctgtcagaaaaaatggagcattctttctgaactcaggagcgtgtggttcatgcgagcttccttgtagatggttgctacaataaggcttctttcatacaggtgtgtttatgccccaggcttgctggccacagtccattccatttacagaagctgaattaaacaataactactgcattgcaaaaaatggtgggggtgggaggaaggggagggggaaaggtgagcgtcaaaggagatgcctgagagctttgttagggccaagaaaaaccctgttgcagttgtcagagcttgttgatgttgctgggaacggcactttttttttctcctggattttgtggttctgccttaggaaagaaagtaaaatagaacggaagaacaaagtcctactctataaatcagcagctgctccttgccagatcaaaggagtgacatttttgctcctggactacttgtccacttgagggcttgacaggcagctaacagctggcctgctagactgtatgggagaatcagcctacatcttcttctgagcagatgacaagctaatcagagacatatccatagcacagggcatgtgagtgcaccttgatctcttcaaacatatctaatacataattgctaaacagcttggtgcatttttggccagttaatgcttaggtggtttccattaagaagtaggatagagaattaatacttcaatcaaaggtgatcatgaaagctaaaaagctactagatttgttgggatcttttcctcttacagtaaaatggctaggaacataatgggagttggctaagaatgtgtgcaactgattgtgaagtgactggttgatttgcaaagccaggtcaggctacagtgctcagatacagaataggtaattagaaatcagtagttttgaaaatgattgtgcctgctttttatgttgatagagttaaataaacttgtaggtgtaccttctgtgtctgcaaaaagttattttcagaagcactgtaaggtgtgtaggtatccagatctggaattttaatgtcagtagtaaaagtttcaaagtaattcagtttctagttgacttccatctgcaataaatcatgtacaggatgaggtaatatactacaacttatgtctattgacttaggattttatctttaagaggatagatcctagatgtgaatagctaaggaagtttgagtgttttctcctcccttgctttcaaatagctttgaaagatcacttttatagtgcatgataaatagctacatatgaataatctgatggcattctgtaagagtaacagtgcttcaaaatcgtaacctgctgggatgttttgttacatgccatcaagtgtgattgtattcatggaatagtgtttactgttgctcaatattgtaaaggaaataaaagataattccctatctgaggggaaatttctcaaatattttaattaaaaggtccctacagttacccatataaaccttagtcaaataagataacaaattttcttgatctcctttaaaaattcttttatgtataaaaataattatatttattaaaaactccaacagtacagaattatttggaaaaaaagatagaaatctaccattctcctatccatgcctgagagatagcctctgttaacagtcttcacaaaaacattttactggcccagcttttcctttaagaggtacagatggagtacaataaattaaattattataaagtgtttattgcccaaggcaagtgagtaaaaggctgtttagatctaagatacctaaagagaagagtatgtgcatttttttgcagctgagattcacaattaaaacttgatctttgcaagtttctattcttaagcagagcactagaatttgatatgtgatctagagcaaggcttctcatacttaaatgtacataaatcccttggagatcttttaaaatgcagaatcagattcagtagcacaggaatggggacggtaatgtatttctgcatctctaacaagctcaaggtgatgttgctactggtccatggcacacatgtaaagtagcaaggatctagagaaccatacagagagtgtgattccaaaagagctcactcccctatccacctcccacccctgcaggcagatgcctgccccagtgtctaaaatctccaccatagcattgtacatttggattaaactccgatttttagaaagatccggcgatatgaacacacgctacctgtaggagtacaacacagttattaccctgtggccaatccagcatagatttgtttaacagccacccacctattcctaattactatctatgagagaacagagctatttaggagcattggataggtgcattttgactgtaagctaacatttaatgagcttgctatgtgccaggcattgtgctaaggatcttgcatacaaaatctccctcaatcctcaaaaccacccaggcccagttatttcctcagtttacagataggaaacagagtgaagcttgggaaggttaagaagaactgtccaaattcacacagcaaataaagggcagaggacatgagcccatgctcttcaccgtattgctctatgcataagtctggagtatacaacaataatggagaagggcatgctcaaagtagagtattttagtaaagaacctccaggagcccttgtaactttagggaagaattagatgaaagtaagaatattgaaagaagacagtagaaggccatcacttacttgataattttgtccagggccttttatgtcagcatgaacactccattattcaagccatattcataaaggtacaaaatgttgtgattccagattaacatcatgtttttatattataaatttattagtatttagttcatgtgtttttaaaggtgtaggcaaatctagtattctatcaaattataaatcaaactattgcttagggaaattcattatgatccatgagtctgtccctaagtaacatatgaatctcattcatttaccttactttgctcacggttgtctgtgagaaaggagccattgtctggtcaccagtggaaaacttatgtctgcgacatgactccatcatttgcgtgcccaagttcatcttcaaaggcattaagcttgccttattcactgatttaaccattttaatgtatcttactgagaaaatcctactctcagctgtaaccatagcacagagaaatacttgctttttttgtaaagtaagaaaacatggagaaatttgataagtgacttgccaaggctgaagtttcatcatttgaaacaccagccaggagcaagtgctgtgaataagcactgtggctgatgggtcccagggctggggacagtagggaagcagggccttttcatgttttaacaggtccccggtcactgagctacctacgcctttccccagttgatctgatctctcttcaacggttcagtccccttccctgcgcaaagcaatccatgcagaatcttcaattccagctattcttgattcctcctcagagtgttcagggatggcagctttccaggtaactccatggaggcctgcactttctaacaaaaggaatgcctccaaaaggagttggttaccaggtgtggcatgaagttagtgaaccagaaagaagggatttatccgccatttaaaaagattggggggtggagaaagaaaggaataaagaaaagaaaccaacaacaaacaggaatgacacctaaatctacttctatcaatctgaaccatacttcggagtaaaaagtctttaaagaaaaatcatgatggtcagagttcagttgtagaaaagtatgcaaagctaccaagtttagactttctgaggacaggagaggtctctgggaaatagctcttcagcaaggcagtaagatgagattacagtgatatttgctaccttgggtttatttgttttaatgtattttttcatctctgagttgagtcagaaaggcctcgtgattcttggaacatcattgaatttatttctataattaagttatttttaaactaacagtcttagtatataatttttaaggatcacacatactcatgcattttctacttaagtaaaatttagagaaaaagtagatagtcttagtagatactctcccaagcttttgtatgggcctggatactaactttgtgttcaatacaaatcaatggaactagggctctttagggtattcattccctaaggactcactaatgaaattatgtgtagccctttaaaaaaagtcacaatgaggctaatgaaaattttttttctaagtgaaatctagatagagctagacactaagcttactggtacattttatggacaagttgtaaaaaaactcagaatgttttttaagaactgtttaatattgaagaagactttgtaacttaaattgtttaaaccgatagaaaagtagattatatgcctgcaacttcgaaatcattctggtatgacattaaaacttagagaattttttaatatcagatacagatgaaaaatctaacagtctttggattggaaataacttgtgggggttttcattaaagttgggtgcagcttgctgcattttggttagttggatgtcttcagcaatttttcaaatgttttgggtttggcaaagtccaaaatgttttttgccaagaccctcttttccccttattttttaaacccgtgtgaaattcaaggataacttaatccatatgtgtctgattcatttacacttaactcatcaaaatgttattttataaggcccatttaatatccatggaaccttttgagtctttttaagacaagtcttttgtctttgaaccagcaagttacatttttccatatgaatggagcctgaaccttgaaagactgaagatgagttgattttcaacttagcttcttcaaattttacgtaaaatcaaagcttgatattctatttactacttgagcattgaaaaaggtcattctaaaaaatatagattagaagatgtggaaaaaaatttatttcatgtaattttgagaaaagaccatatatggaaatttcatcttacaaatattaaataaataaaaattatttctagtttgatttgttttagtctataatttaaatggctccatgttatgtatgtcagtgtattttctaagagtggcctctgagtcatcagtactggtaggaggcggtaatttcattttttaatgtcagggttttcttacagtcagctcattaattgttaattttcatagtaatatctatgatgtcaataaaatatcccaagatcaggggaattgacaattggcaggagttgcatgttaagagatttctgaaaatttggggcccatatgtttttaaaattctgtgtgatttgaaagaatgtggtagaattatgaatctgtcaagaaatagcactatggatcaaaaacattgtttgagaacaaaaatccagagaggctaaatggtgcccaagtgaaaaaagcaaaatctctgtgaccctttttaaaaggacctagtgaaaaccttcagaggcttctattcatatttgcttaggagaagtgggtaaagaaaggccattgccataactgctagtgaacatccagtccatgccatggtaactagttgaaaatgttatactggagtggcatttccaagttcagtgcttctataaagacctgctagctcacagaatgcttttttaatgttctgcattgttgtgtgtcccccattgaacaaccttttgagcggacctcgtttttactaatgtaaacattctgactagtatccaaagaaatgacctttgagtgaacctctaaccttccccgtaagtatttgtttgaagacagtgtggagttctcctgctgagaactaagaaccatgatgccttgcagctctgtgagtaagggagtgtttgggggaactggagagaaagacataaataagggaacaacctccagatgtaaagaataaaagagtgaaattaaaaagggaaaaaaatagcaattcgttttacccgaagagttagcctataccgaaaaaaaaataaaaataaaaaacgcaaaacacaaaaaccaggattagtagcacataaaagggggtaaaacccctgccgagtgttgtcctctattagaaacttcaaggagaagagccttctctgaccctcctgagcatctctgctggtttcaaggtgagctgataaaaacggttcctggggtggaaatatcaggtcagtcctccttggttgctgtaaaagtggtggggaaagagtagataattaagttctttttctgattggaggagggatgcttctggaagtctttgtgatctagtcagatattcattcctcagcaacatttcaggtgacaggtgggaagaaagatgcagtttcaactctccttttgttttcacctctacatagctgatcactttcttttttgacaactgagctacactttcttaagtaataaagaagtccattgttttgcaaacaaacaccatatgcaaaagactcctttggttttctcccagctattattcctcagcttaattgtattcccaccagagtgctcacaggaggcccgaccgagtggggcctgactgtcctcctccaaagggacttcagcttcctcggaacacagagctgccagcacacactgaatttttctggctaatttcaaagagtgagttttcagttcctgcctgtggccccaggtggactcattaatcatgaagtccccctgtgcttaagatctgaaactggaaatattgacagatgttatcaatgggtatatttttagggagaagctagctggatgctccctgctcctccgaaatgcgtggtcagtgaatcgtgtgcatgagctcaaatgtgtggggaatacacgtcgttaagtgcacagggacaagggtaactcacaaatggtagaaaattgttttgtttttattaaatttggagaaataaaggagatttcttatcatcttactctgtttgtacatgaatatttgatgggcattattaaacattaaagtaacatgaagtaggcacttatttttggatttccaacaaaattagatccaggcttcttagatgaaataactgcttctcctttgcattcctgcgattcagccaccacctgatttgcaaacgtttcttgagctctaatatcaaacatgtgtacctgaggctctgtctttctagtgggttgaaaggtggctgggtttatggttggcagttaccttatcctctgccctgggtgtcccagcttaggctggaaaggctgcccccagctggcactgacctctgaatgacccctaactttacaggcttaaactgcaggagttgccgaagagcagaagtctttctggccagcacttattactgctgtgttggtgataaaacttcagacagcctaattgatggctttgctgacctaacaataccttgtgaaagccgagtgctagagcctggtctccatttatgaccagctgcaaggggaagctgggtctccctatcacggggagtctagggaaagggggaaagtcttccagcctgtgaactttaaccagattcctacttgtgcaagaagcagaagcacaatttgaagttaatagaagctttctcatggagaactttattccgtccctgagctcttctagcaagttgttttggagttgactacgcagtgacgacggagattacccagtcaactatttttgaacgctgaaagggaaaatcacctttaaattgaaaagataattttcagaagagatttgactgtattttgtgctcctcagcattcatgcaaaggtgttcgcagagtacagaaacggagtatgatgactggacttctctgttctctttcaggtttattaatgccagaagaagaatagtacagcccatgattgaccagtcaaatcgagcaggcaagttccaagtagtatctatatttatgtcccacaggcacaaatcctcatcaagttatactccagtagtttcctcatctgataaataagtgcttccaccaggcattctggatttttttttttaatgtccccagaatcccactcaaggaagcaacttcagtaagtggtgctaattggagatttcccaccctgactctactgacactgctttttattttctttctgaattggtaattgggcacaggtattaatgccacaagcagcgtgtttgtgagctctggcattaccccttgcttgtctgcatccaatcattagcacactctcatttttctgttacccacagctccttggtgtatgctaggctttcctttctgtagcatctgctgttaaacttattgtatccattcatttgctttggctattcataatatcctattaaagcctgacttgctgcattgccaccattattttttattaaagaatattacctttgtataaaatgcttcacatccatgctgctaaaatacatgtgagcttttctcagaattctctcaatttctctaaaacagtttttgtatggtactatcagaaccctcctggtatactccaagtcgttttattttgaaacagacatttcctcagtttactgagggtttgtggtctcctgcaataaggcttatagggaaaaacagttttccttggggtgatgactgctgccactaacaacggtgttaaacttgatggagattttacctgtggcctcgctttaaaggatttgtgaaaattagtcatcctttggcaaaatttccccaataacgccaaaatatgttcccactattggaggctagggagaagaacataaaacaatggaaatattatatttactaagtttatatttccttggtgtgaataaaaaggcaagcttttaattgagtctatttaaccttgtgaaattgtattcaggtttaaaatgtttgtgtaaaatatgaacattttgtattaagccaccagagatggcagcctcagagaatcccaaccaaatggtacattgcaatatttgtatatggggtacccctaacttctccagccttcgtccccctaatcaagagataagtaaaaaagcaagggctgcagaggacgaaccccctgggaaactggccagtgaagtctttcttccagaacatttttaaagctactcacacaccttcactcagtcatcaagacactcagacaaaccacacccccatttgtagagtgccaaccacattgttgctataacgtttcagtgctgcagcgggaacaattgctgattgtttggtatatcttttcttctttctcctctgtgtcctcgaatgaccacaatcaggttttcttcttgatccttcagtgagccaaggagcagcatatagtccagagggtcagcccatggggagctttgtgttggatggtcagcaacacatggggatccggcctgcaggtaggttggctcatcccgcctctgggcttccctgggaagtgccacctgctccaccagcctctccatccactctactatcccactgtcatggtgggtttaacatttgcctgctgcctgctctgcctgctttctttacattgggtgggggaaaaaattcctctttgaaaaagtaaagattttaccacagtaccattatactctgccccatacacatcctttttcttttttctttttaaaccaaggcaataagtgaaaaggaatctgagtttccttctattttttcaccatcaattattgctgattttccggcctcttcttggattttatctcctttctaggacctatgagtggaatgggcatgaatatgggcatggatgggcaatggcactacatgtaaccttcatcatgtaaagcaatcgcaaagcaagggggaagtaagtacagtcgggtgcgatctgtcttcactatcacttcagagactttattttattttttataatttgcccccattttatttttccttgcccataactgcatgcctttccaaactaaggacctgtttttaaatatatatcacccatctctgaagtcacagatgacactgatgtgcacttttgaaaaggccaactgacaagcctgcgtgtgttttaagcaggtgggactgccttttagcctatttactgtggccccaatgtgcacaaacacagacatcaggcagatattggacatttaagaataaaaataatgtcttgggggcaccagttgactgagagaaattaagcaggcttcaatgaagcgataaaaaaaaaaaggaaaagtagaactgtcctttgagtgacataaatctgtcagaatacgattgatgcccaaattatcttatatgcaaagatgaaatgctgcagttcattatgcctagtctagatatatgacagcagtgacaccattgattcttcactagggagtcggtgtgttttgattattttttacatgtgcctactgacttccgacatgagacagaaagacaggaaagtcagtcaataaatttaaagggaaagacatttaggagcaactgaatatgaaggaatggatttttcactgaggctgaatggctgcagttggattaagaaacccattagactttaaagcttcaagtgtttttgacatctgaaaaaaattcagagtctgccaacaagatatatcctttgctgaagacaccagagcataaaaaaattcatataacattgaaacttccttgtttaatgaggctgaatataacaacacgtaccttgattaaatcattctctatatgtaaatagaggccaacattttataggggagctcagggggtcaccacggcacaccattgatgaagccaatttccttccttccttcctttactaatgcagtcaaaaaatgtagaaagcaatgttccctaaaacagctatagagaaaacatttgctcagcttggatagttcttaatataggccatataatttctagcctatttaattacataacatattttatgcttcatgaccaattacattaatagcttaatacagaagaatattatcctctcttgatttgattatgcagccacacaatatggtatatttggtacttaattatcatcatccattgagcaggctgctgtggtagaataaacagagagctgggactatgcaggctgtgttattgtctttagatggttttgccacttctgttaataatggactgcggatctacttaacaaaatgactgcagcatataagcctttagattaccagcttacagtgtcaaaaacatctgttcagcttttcaactgtatgcactggaggttaaatagaggtgaataaagctgtccttttagatccggggatgtgcaacagtaaatataaccttaattcaataaacaggtaacttgtaagagaaatcagaatccttacaattgctgacttcccaccatttaactcataactttgaatgttgcatatctcaattgagaatttctacatttattacattttattcctaatatcaaggcattatttggggggattttcagagataaactaccgggcatgtcatatgacctcacattgacttcttacctttgacctttacaatctcttgggtgtactgctataggaatgcctctaattcaaaaagggggcttcattttaaatacacgtaaaagctcatttcttcaaaatgaatatgctgtaatgttttgtgtaataaatttttcatgaggaaatatagatatgataagatgtcaattttattttattctactatctacaatttttgtccaggtctacaaatgcaacacagaaaaataaatgatctatcaacagttaactgataaaactcgactcaaaatttatattcttattgcatttatcaaagaaatgtactgaataccattttgaaaaacagttccactttatgacatttagttgcattaaatatttagttctgttgtgttgcattatactgctgtgcgatgaaattaaatgcaaactacaatttgaatgtctgcaaacattggcaagaatctgcagctaaatttaggtataagatttgcagtgtctgttgttttttttttttttttcttttcatctttgatgggtaaagtataaaaatgtttaggaatttgacccgctttctttttccctctctattttcaggtttgcagagcatgccaggggactacgtttctcagggtggtcctatgggaatgagtatggcacagccaagttacactcctccccagatgaccccacaccctactcaattaagacatggacccccaatgcattcatatttgccaagccatccccaccacccagccatgatgatgcacggaggaccccctacccaccctggaatgactatgtcagcacagagccccacaatgttaaattctgtagatcccaatgttggcggacaggttatggacattcatgcccaatagtataagggaactcaagggaaaaggaaacacacgcaaaaactattttaagactttctgaactttgaccagatgttgacacttaatatgaaattccagacagctgtgattattttttacttttgtcatttttcatcaagcaacagaggaccaatgcaacaagaacacaaatgtgaaatcatgggctgactgagacaattctgtccatgtaaagatcctctggaaaaagactccgagagttataactactgtagtataaatataggaactaagttaaacttgtacatttctgttgatcacgccgttatgttgcctcaaatagttttagaagagaaaaaaaaatatatccttgttttccacactatgtgtgttgttcccaaaagaatgactgttttggttcatcagtgaattcaccatccaggagagactgtggtatatattttaaacctgttgggccaatgagaaaagaaccacactggagatcatgatgaacttttggctgaacctcatcactcgaactccagcttcaagaatgtgttttcatgcccggcctttgttcctccataaatgtgtcctttagtttcaaacagatctttatagttcgtgcttcataagccaattcttattattatttttgggggactcttcttcaaagagcttgccaatgaagatttaaagacagagcaggagcttcttccaggagttctgagccttggttgtggacaaaacaatcttaagttgggcagctttcctcaacacaaaaaaaagttattaatggtcattgaaccataactaggactttatcagaaactcaaagcttgggggataaaaaggagcaagagaatactgtaacaaacttcgtacagagttcggtctattaattgtttcatgttagatattctatgtgtttacctcaattgaaaaaaaaaagaatgtttttgctagtatcagatctgctgtggaattggtattgtatgtccatgaattcttcttttctcagcacgtgttcctcactagaagaaaatgctgttacctttaagctttgtcaaatttacattaaaatacttgtatgaggactgtgacgttatgttaaaaaaaaaaaggtgttaagtcacaaaaagcggtaataaatatttcatttttgattttttgttaggcttttgcgtttttaatggttttaggacaagactgcacaatgccaactctatacagtgttaaaagtaggtttttccccccagcagttgagtatattttaaactcatcaataatttttaaggtaatcatctatagcctttcaatgtctatttgacctataagttccaccagcagaaaacttctaaaggtacgaaactatgtgtacatgatgagccaggttgaaagatccccttgaacatgctcaacctcctttttagatgcatgacgttaaaaaatatatactttcagataaagcttttcatgggcatcctctgccagaataaaggacttttcagggttaattttacaacataagaaataatgtctgtgctcaaaggtaatttatctgcctgtgtttttcctctgcctgtcttactacaatattgttggatatgtaaatgaaaatttacatatgggtgttcatagataagtaaacaacttctatggagtttgaaattctgactttaaaagattacttaatcattaatattttataaattatattgtggtatatttttatttcagacacatccatgtgcagggatgctagtgtgatgatttgataactaaacttaaacttttttctgaaaacaaaacaaaacaaaatggacggtataatgccattttcaaaattttatgcaacattcctggaaatctataccattagcttattgatactgcacaaacaatgtctgctaaagtgtgcaaaaagggtgaggcatgtcccctcaattttcaaataaatatactatcctggaattttttaactcttaaattttgaatctttgtttagaaagaataatgtcatatactttggctagatatgtgatgtcaaccggctaaggaaattattcatcatctctgcaaacttaaacttggaagaaatccatagttattatttggggctcttccatctttccatttcagacagcatttatggaggttctatataaatgaacgaggaaatacacttctattgttttgtgttatatttagtcaggtagaatttttacaaatacatttcagtttaagtgttgtgttgctgtttaaacatagaaataatgcttctgacacaaactaacttaatagagaaattcagtgccacttgggaaagagagatagcttccctctcatttttgctattctattttacatgaagtctttttgtaaattttaaatatttgcctatttttactttaaatacttttatgtaaactatgaaaattccccattataaatcaactctcacatcaggtgggaaaaagaacctttttttctttccactcagtaaattctgaagggtttccttggcaattggctcgtgtttaggatgtgttttatgcaattatcaagttatctcattgaagtttagagaccagagctctcaactcttggttttaatgaataaagtcatctcatgcttagtttattcgtcaaacccacgtcctatcatgttaactttaaccttcttaaatatttggagatgaatgataattgtaatatttgtttgcattaccttgctctcccccacccccaaccccatgataacacagagaagtgatagatttgtccaatttttataatgctttttttacaccaccccggaaggcacttgctcctatctcgggtttactatttagtgtaaagagttccgatttgggtatatttaagaaagactcagctgtcaaaagcaaagaaactgggaatggtgttttgacaaccatatagtgttaaaggaaatactgtagtctgaataaaattgcttatgttctcc

SEQ ID NO: 179 - DNA, 4245 bp, Homo sapiens
cgagctgctgcccgcaggaggcaggacgcgcaggggtgggaccggcgccccagcccgtctcccggccccgggcgcgcgggaaccccgggtcctgcagcctcccgagtgcggagaggcggggccgcccgctgccgcccggctgcctgcgccccctcccgcggccccggctctgggagcggggcgccccgcgcgcgggcacacggcggccagagcgccgaggcggtaccttcagcctgcaatgagaggaacccgggagagcccccgggagccagcgaagagcttggctgctgcgtccagggctgctgctgccgccgcggctgcttgaaactcctcaaagttgagagccggctagagggtgccgcccgccgggagccggagggaaaggaagtcggaaggtgcaagagtgacagacacggacagacggacgcgcagaccttcggaaggcactgcgtaggcagcctccccggagcccacgaggctccccagcaccgtgagttttttcctggatgggtggttgctaagtatttccgtttaattgtttgtagcgtacgtttgcgtatagttgtgtctgttggagggagtttaaaacaacaacaacaacaacaacaacgcaggatgcaccttaggaaaaaattgagtttctgatggtgggtgagacggtgggttgtatggagagaatgtgactgtacatttttataagcaggactaacccaggaaagaggaaaaaatacatttaacagtgaagaggcaacacagagctccctattgtgaaataaaacccatttcaaaagttattggaaagaaagtaaggtatggctcttatgggttaactagtggtagtcagtttctgctttttactccctctgaattattaattgtttgccaggttcactggtgggaggctgagccggtggaaaagacaccgggaagagactcagaggcgaccataatgtcgttacgtgtacacactctgcccaccctgcttggagccgtcgtcagaccgggctgcagggagctgctgtgtttgctgatgatcacagtgactgtgggccctggtgcctctggggtgtgccccaccgcttgcatctgtgccactgacatcgtcagctgcaccaacaaaaacctgtccaaggtgcctgggaaccttttcagactgattaagagactggacctgagttataacagaattgggcttctggattctgagtggattccagtatcgtttgcaaagctgaacaccctaattcttcgtcataacaacatcaccagcatttccacgggcagtttttccacaactccaaatttgaagtgtcttgacttatcgtccaataagctgaagacggtgaaaaatgctgtattccaagagttgaaggttctggaagtgcttctgctttacaacaatcacatatcctatctcgatccttcagcgtttggagggctctcccagttgcagaaactctacttaagtggaaattttctcacacagtttccgatggatttgtatgttggaaggttcaagctggcagaactgatgtttttagatgtttcttataaccgaattccttccatgccaatgcaccacataaatttagtgccaggaaaacagctgagaggcatctaccttcatggaaacccatttgtctgtgactgttccctgtactccttgctggtcttttggtatcgtaggcactttagctcagtgatggattttaagaacgattacacctgtcgcctgtggtctgactccaggcactcgcgtcaggtacttctgctccaggatagctttatgaattgctctgacagcatcatcaatggttcctttcgtgcgcttggctttattcatgaggctcaggtcggggaaagactgatggtccactgtgacagcaagacaggtaatgcaaatacggatttcatctgggtgggtccagataacagactgctagagccggataaagagatggaaaacttttacgtgtttcacaatggaagtctggttatagaaagccctcgttttgaggatgctggagtgtattcttgtatcgcaatgaataagcaacgcctgttaaatgaaactgtggacgtcacaataaatgtgagcaatttcactgtaagcagatcccatgctcatgaggcatttaacacagcttttaccactcttgctgcttgcgtggccagtatcgttttggtacttttgtacctctatctgactccatgcccctgcaagtgtaaaaccaagagacagaaaaatatgctacaccaaagcaatgcccattcatcgattctcagtcctggccccgctagtgatgcctccgctgatgaacggaaggcaggtgcaggtaaaagagtggtgtttttggaacccctgaaggatactgcagcagggcagaacgggaaagtcaggctctttcccagcgaggcagtgatagctgagggcatcctaaagtccacgagggggaaatctgactcagattcagtcaattcagtgttttctgacacaccttttgtggcgtccacttaatttgtgcctatatttgtatgatgtcataatttaatctgttcatatttaactttgtgtgtggtctgcaaaataaacagcaggacagaaattgtgttgttttgttctttgaaatacaaccaaattctcttaaaatgattggtaggaaatgaggtaaagtacttcagttcctcaatgtgccatagaaagatggggttgttttccaaagtttaagttctagatcacaatatcttagcttttagcactattggtaatttcagagtaggcccaaaggtgatatgactcccattgtccctttatttaggatattgaaagaaaaaataaactttatgtattagtgtcctttaaaaatagactttgctaacttactagtaccagagttattttaaagaaaaacactagtgtccaatttcatttttaaaagatgtagaaagaagaatcaagcatcaattaattataaagcctaaagcaaagttagatttgggggttattcagccaaaattaccgttttagaccagaatgaatagactacactgataaaatgtactggataatgccacatcctatatggtgttatagaaatagtgcaaggaaagtacatttgtttgcctgtcttttcattttgtacattcttcccattctgtattcttgtacaaaagatctcattgaaaatttaaagtcatcataatttgttgccataaatatgtaagtgtcaataccaaaatgtctgagtaacttcttaaatccctgttctagcaaactaatattggttcatgtgcttgtgtatatgtaaatcttaaattatgtgaactattaaatagaccctactgtactgtgctttggacatttgaattaatgtaaatatatgtaatctgtgacttgatattttgttttatttggctatttaaaaacataaatctaaaatgtcttatgttatcagattatgctattttgtataaagcaccactgatagcaaatctctctccaaaattcttaaagttgatttttttaaagggggaggggaaggctttaatgtgttctagatcaatttataccttccgtatgacgttttactctgatatcattgtgcactttagccagatccagaaaacactcaaatttattttgcaacaagtgagagcccaggagacctccttattatcctgtctctgctttgaggcaatcaagtaccctctctgaacctaggttccctcatctgtaaaacaaaggtttcagaccagatggtgtttaaggtttctccccatactggaatgaatgatttcttggtggtattagcatcatcacagacctatacttgctttctgaaactctaccacatactgaaggaatacaggaatgggattaagatgactagcatagcagtgtacagcttgaagagatgttccacatcatcactccagctccttctcttttctcagggacaaatgaggcccagagagaatacgacctgtgtaaggtcaaacagtggcagggaaagaaggagagctggggtttagcattctccctggtgaagattggaggtccaaagaaatgactcctttttaagggatgggcataaaaaagtgatcaaaacattgcaaaggagaatcaaagattgattgtcctggggctaagaaagaagataatttttaaagaatgggagtgggcaacagtgaaaaatattgcagataagtagataaggatagaagatcaaccactgactggtagta

SEQ ID NO: 180 - DNA, 6464 bp, Homo sapiens
aggcccgggggtcgccggggccacgacttctcggagaccgtcctgcgctctctggagacgcgctgtccgcgcccagggtggtgccatgtggggcgctcgccgctcgtccgtctcctcatcctggaacgccgcttcgctcctgcagctgctgctggctgcgctgctggcggcgggggcgagggccagcggcgagtactgccacggctggctggacgcgcagggcgtctggcgcatcggcttccagtgtcccgagcgcttcgacggcggcgacgccaccatctgctgcggcagctgcgcgttgcgctactgctgctccagcgccgaggcgcgcctggaccagggcggctgcgacaatgaccgccagcagggcgctggcgagcctggccgggcggacaaagacggccccgacggctcggcaggtagggcggcctgcgcccagcgcgaaagggaggacggttggcgttgcctggacgtcagggacctgggagtttgaaggggggaaattcaggaaagggcctaggaccaggaggcggagtctgccttctggcttattatttggtcggtgtgggtccctaattcaccctcacgggcctcagtttctccatctgtcagccaaagggtggcttagagttaattttccgaacaaaatcacactcctaaggcagtgtgggccacagacagcccccatattccttctgaccagggtcctccgggcccctctggcgtctcctgtctccatagggcttcatgtcttaggggtacccaaggagacggcgagggtgcgcccccacccgtgagggcctggcagcggtgctcccctgaaggctccccgaaaggaaggcagctcctcagggctttcccggggctgctgccccgtgccagacgccgcggattcccatcttctccacgcggcggcccctctcccctgcagcggcccgcctgtggggcttctggactgttttccttaccacgtcagacttagtaggtgtaacatcggagcagtgcccagccttgctctttgtggctttgattttttttttctttcaaattgccaaagccagagttggaaagtaaacccgtgaaagaatttggtaggttgcacttcactcttcagaaaccttccggaatgcctccctggggtgtctacaccagtcactccgtgtgtgtgtgtgtgtgtgtgtgtgtgtgtgtgtgtgttatttatttcgggggaggggaggtgtagaggtaaaatggcaaacgtgtccccgagggggcggctcctcctctttgtgggcccgttgtgtttacctgggaggcttttcgctagcatcctgagcctgggttcgggctgcttgagctttggcacagcgtagtttgtgtttatagagctgcctcccaggacctcgtgagagacagctcttttcagtgccgttccctttcgcagtcaagcattttattagcatgctactcctattgttctgctgtcttgaatctgaagagagcgtaattccagaaccagcgcagtcttaaaacgcaagctcagtctcgcagactgtgtggccatggaagaaagcccagagaagggagccagaccccgaactgctacagtgagatgtctgctagattgggctcattaatggtctccaaaaagttgggatggctttggattagtcgggacttctcaggacgagacttctcatgacgccctgtgttgtgcatggatgccttcttcatgctacttttaaacgtttttttcctaaaaattgtatttctttcacttttcttctgcagtgaagggcaacatgcctaattaagcctgccggggggcttatagtagcgttacattccttatccctgtgtagttatttacatttccaattaaaaatcctggaaagagaacacttatttctccccaaaactcattatgtggactgaggctggtttcagctagtttctgctatgattggggtacattttttttcctgctttactactattaatttattttttgataacatatttagggctggtgtcttaatttagagaatgaaatatttataacacgccaaggaaaaagcctgcatccacttctccagtgatccgtagttagcctgaagtgatagtgtaattaggacagttctactgctgggcgccagctgtgctgcagacactgtagcaaatgtttctacctgctaaaggggcgctatatatagaaattgctctgttcagcattgaaactccaggaaatattccacagtcagcctttggttaaatacctataaagtattgttttacttacagggcattatttctccataattccacctggtattatactttaaaaacactgactccagcaataccagaacagtgaaaaggagcataattagaaagcccggctgctctaatggatgatgaaagggtattcatagagctgacctcaaaggcgtggtctccttcctaaaatgctgccccatccgactctgggctggcattatgctttgccaagaccagtaagacccaatccacccctgtgcttatgtatttcccaaaaatatagccaggaggttggggcaagaacacatcagaaaatgcaggctcttggtaacatagggtagaattccacaaaagtggctcagaggcattctgcaggcacctcccatctgattctgtccctgtcaacctgcgtctattttctaaagccttgtagtgccctctctatggctcctaaaagatttttttaagaaactaattttatgtatttatttatttatttgagatggaatctcaatctgttgcccaggctggagtacagtggcacaatctcggcttactgcaacttctgcctcctgggttcaagcgattctcctgcctcagcctccagagtagctgggattataggtgcgcgtcaccacactcagctaaattttgtggttttagtagagacagggtctcaccatgttggccaggctggtcttgaagtcctgagctcaggtgatccacccaccttggcctcccaaagtgcttggattacaggcgtgagccaccgtgccccgccagaaactaattttaaaatggagtttgctagtggttttatcaaaaggtttttatttttactttttatggttttctattttaaaatcagcttcccgggtgaagtgtgatggccgttgctttatgctctgagggctttccctgtgtactcttgccttcttggcttgctgtgggtgactcttctttctggaacacgtcttgttgctcctgatgtttgctcttggacattgtttcaggatggcccaatgcctggaataacttccctccacctccacacagaccccatcacctggacccaatgccacccaaggaccctggcttttgctaaggaagagtgaagagggtcttttttaaacccctccttgacccttctgtgccttacctcttgtacatctgccttttggaaatggtagtgacttagagtctggcctaaatttttgacttaactgcttatgaaaaaagaacttgctaaaaaatggtaaaaagaaatttgcaaggaacttaaataactttctgggggaaaaaagacttttaaataagttgaagtcattattactatgaagatcctacaacaatatggtcgggcagacttaagtttggacagtttgattatggtaggaagtttagaaccataactgtcttaacctgttaaacccatacttttgctaaatcggatatctggctcagtcagtcttgcagttgacaagttgaactaaatattaacagtttgcttctaggggctgacctgccatgcctgtagggtcttaggacctttctaagcacttgataaagaatggtgcatcttatggactcctaatatgtgaacaaattagcccagtgtaggtccttcagctgtgggtatcagtgttgctcattcattcattgccattgccagttggcgattggtactgtgttcctagagtagatcataatgttgtgtttctgtcctttgcttcagtgcccatctacgtgccgttcctcattgttggctccgtgtttgtcgcctttatcatcttggggtccctggtggcagcctgttgctgcagatgtctccggcctaagcaggatccccagcagagccgagccccagggggtaaccgcttgatggagaccatccccatgatccccagtgccagcacctcccgggggtcgtcctcacgccagtccagcacagctgccagttccagctccagcgccaactcaggggcccgggcgcccccaacaaggtcacagaccaactgttgcttgccggaagggaccatgaacaacgtgtatgtcaacatgcccacgaatttctctgtgctgaactgtcagcaggccacccagattgtgccacatcaagggcagtatctgcatcccccatacgtggggtacacggtgcagcacgactctgtgcccatgacagctgtgccacctttcatggacggcctgcagcctggctacaggcagattcagtcccccttccctcacaccaacagtgaacagaagatgtacccagcggtgactgtataaccgagagtcactggtgggttcctttactgaagggagacgaaggcaggggtggattctcgaggtggaagtccgcacatgtcggtggtatttatggcacgattcctttggatggcttcatttgcccccagactgtatgaaaacatctccgaattagcatttctggatatgtttcatccagggtatcattgatttatgatggaaaaccggcctcagctggagatgactgtgatgttgctgatgggtgtataacaaatgcttgagtccgaagtgcccttgagatatggttgacgaaagaattttataaactgataaattaaggatttttattatgttgttattattatttcttttttgttgttgactgcacaggatcaaaatgcctgttatctcccttttacctgggactttttttttttttttttttttttttaatcagacagggtcttgctctgttgcccaggctggagtgcagtggtgcgatctcggctcactgcaacttcagcctcctggattcaggcaacactcctgcctcagcctcccacgtggctgggattacaggtgcctgcccccatggctaattttttgtattttttgtagagatggggtttcaccatgttggctgggctggtctcactctcctgacctcaagcaatctgcctgtctcagcctcccaaagtgctgggattacaggcgtgagccaccgcccccagcctgagcctttttttttttctaatgcatccaaggttaaggggaagacgcaaataacaggactattctaaaaggaaacctgtttgaactctgtgagatcagtcatcagtctcagtattccacaggcacaccttaatttcattgtaaaaagatatatatattttgtctatttttgtgcttttgggggcctattttgtgcttttttaccttatgtagagatcttattacaaagtgattttctacattaaaaagagactgaaataaattgtatagttacttaactaatgaagacatttcagaactctgggatgattttaatcttgaagtagtaggtggtatagtcataaaaccattcatccccttcttgattgtatcttaattttctggctttaaggtgacatctgagaggtaatgcattcttttttatattgaaatcataaactatcacccgctgcttctctgagttacttttaattttgccttgtggttatggtttggcgtttccttctgtttggttttcagagccccatgtctatatagtcctgagtgcaagtaattactatacttgtaaatgaagatcagtatttctgcctagatctgataaaaaaattttcttgtcttagttataaaaattcaaagaaatgtgttacaaagatacttagtatagctcctcagccataacctgagacttgggatgaaatttaaaccagatacgatttactttgcagatcataaggctttttatactcttgttatcaaaatggcttatttttcaggcactaaggattgttaagagaaaagcttttcaacgaaggattgcctttcttctcccacactgttcttgatttcctctctctttcaggcctcaacaggcactgtattcattgccaatgttccaaattatcaaattcaagtgaatttatttgtgtgttctttacttatataaaaaaagataactttaaggatgtgcaagtacatttccaactgctagcacaaccagtattttgtaattaaacaaatcgctgtatggtatggtcttctacacatttatgtctatagatatctatcgatcatctttctattctgtttcatgactgaataatgtaaaaccagtgttggcaattggtatcatcaatgatactcattttttaataaccaaaggcaggggaaaatcattttacttattaataaatattttatgatgtgaa

SEQ ID NO: 181 - DNA, 3695 bp, Homo sapiens
cctcgtgactgggggctggcccagcccgccctatccctgggggagggggcgggacagggggagccctataattggacaagtctgggatccttgagtcctactcagccccagcggaggtgaaggacgtccttccccaggagccggtgagaagcgcagtcgggggcacggggatgagctcaggggcctctagaaagagctgggaccctgggaacccctggcctccaggtagtctcaggagagctactcggggtcgggcttggggagaggaggagcgggggtgaggcaagcagcaggggactggacctgggaagggctgggcagcagagacgacccgacccgctagaaggtggggtggggagagcagctggactgggatgtaagccatagcaggactccacgagttgtcactatcatttatcgagcacctactgggtgtccccagtgtcctcagatctccataactggggagccaggggcagcgacacggtagctagccgtcgattggagaactttaaaatgaggactgaattagctcataaatggaacacggcgcttaactgtgaggttggagcttagaatgtgaagggagaatgaggaatgcgagactgggactgagatggaaccggcggtggggagggggtggggggatggaatttgaaccccgggagaggaagatggaattttctatggaggccgacctggggatggggagataagagaagaccaggagggagttaaatagggaatgggttgggggcggcttggtaaatgtgctgggattaggctgttgcagataatgcaacaaggcttggaaggctaacctggggtgaggccgggttggggccgggctgggggtgggaggagtcctcactggcggttgattgacagtttctccttccccagactggccaatcacaggcaggaagatgaaggttctgtgggctgcgttgctggtcacattcctggcaggtatgggggcggggcttgctcggttccccccgctcctccccctctcatcctcacctcaacctcctggccccattcaggcagaccctgggccccctcttctgaggcttctgtgctgcttcctggctctgaacagcgatttgacgctctctgggcctcggtttcccccatccttgagataggagttagaagttgttttgttgttgttgtttgttgttgttgttttgtttttttgagatgaagtctcgctctgtcgcccaggctggagtgcagtggcgggatctcggctcactgcaagctccgcctcccaggtccacgccattctcctgcctcagcctcccaagtagctgggactacaggcacatgccaccacacccgactaacttttttgtattttcagtagagacggggtttcaccatgttggccaggctggtctggaactcctgacctcaggtgatctgcccgtttcgatctcccaaagtgctgggattacaggcgtgagccaccgcacctggctgggagttagaggtttctaatgcattgcaggcagatagtgaataccagacacggggcagctgtgatctttattctccatcacccccacacagccctgcctggggcacacaaggacactcaatacatgcttttccgctgggcgcggtggctcacccctgtaatcccagcactttgggaggccaaggtgggaggatcacttgagcccaggagttcaacaccagcctgggcaacatagtgagaccctgtctctactaaaaatacaaaaattagccaggcatggtgccacacacctgtgctctcagctactcaggaggctgaggcaggaggatcgcttgagcccagaaggtcaaggttgcagtgaaccatgttcaggccgctgcactccagcctgggtgacagagcaagaccctgtttataaatacataatgctttccaagtgattaaaccgactcccccctcaccctgcccaccatggctccaaagaagcatttgtggagcaccttctgtgtgcccctaggtactagatgcctggacggggtcagaaggaccctgacccaccttgaacttgttccacacaggatgccaggccaaggtggagcaagcggtggagacagagccggagcccgagctgcgccagcagaccgagtggcagagcggccagcgctgggaactggcactgggtcgcttttgggattacctgcgctgggtgcagacactgtctgagcaggtgcaggaggagctgctcagctcccaggtcacccaggaactgaggtgagtgtccccatcctggcccttgaccctcctggtgggcggctatacctccccaggtccaggtttcattctgcccctgtcgctaagtcttggggggcctgggtctctgctggttctagcttcctcttcccatttctgactcctggctttagctctctggaattctctctctcagctttgtctctctctcttcccttctgactcagtctctcacactcgtcctggctctgtctctgtccttccctagctcttttatatagagacagagagatggggtctcactgtgttgcccaggctggtcttgaacttctgggctcaagcgatcctcccgcctcggcctcccaaagtgctgggattagaggcatgagccaccttgcccggcctcctagctccttcttcgtctctgcctctgccctctgcatctgctctctgcatctgtctctgtctccttctctcggcctctgccccgttccttctctccctcttgggtctctctggctcatccccatctcgcccgccccatcccagcccttctccccgcctcccactgtgcgacaccctcccgccctctcggccgcagggcgctgatggacgagaccatgaaggagttgaaggcctacaaatcggaactggaggaacaactgaccccggtggcggaggagacgcgggcacggctgtccaaggagctgcaggcggcgcaggcccggctgggcgcggacatggaggacgtgtgcggccgcctggtgcagtaccgcggcgaggtgcaggccatgctcggccagagcaccgaggagctgcgggtgcgcctcgcctcccacctgcgcaagctgcgtaagcggctcctccgcgatgccgatgacctgcagaagcgcctggcagtgtaccaggccggggcccgcgagggcgccgagcgcggcctcagcgccatccgcgagcgcctggggcccctggtggaacagggccgcgtgcgggccgccactgtgggctccctggccggccagccgctacaggagcgggcccaggcctggggcgagcggctgcgcgcgcggatggaggagatgggcagccggacccgcgaccgcctggacgaggtgaaggagcaggtggcggaggtgcgcgccaagctggaggagcaggcccagcagatacgcctgcaggccgaggccttccaggcccgcctcaagagctggttcgagcccctggtggaagacatgcagcgccagtgggccgggctggtggagaaggtgcaggctgccgtgggcaccagcgccgcccctgtgcccagcgacaatcactgaacgccgaagcctgcagccatgcgaccccacgccaccccgtgcctcctgcctccgcgcagcctgcagcgggagaccctgtccccgccccagccgtcctcctggggtggaccctagtttaataaagattcaccaagtttcacgca

SEQ ID NO: 182 - DNA, 12224 bp, Homo sapiens
cttgggcaggagggaccttcgatcctcggggagcccaggagaccagaacatggtgagtctcgaaggggaatgggagcaggaaactttgtcctgggtccctcccatctttgctccagtgggtccttctctctccccaactctcgccgtcaactctgtctgtctctccctttccttctctctccctgtcttccacctcccaccttccctctctcctgcatcccaggctctcacactccagggctgggatgtggccatgggaataagattgtcaagattgtgggagcaacagcaacctcgtggggctggggcccgagaagattccccaggggaggggacccttgagttgggtctagtaaggtgactaagaattccacaagcagccgagcgcagtgggtcacacctgtgatcccagcacattggggattgtgccaaggcgggaggattgcttgaggccaggagttcaagaccagcctggccaacatagtgagaccctgtctgtatttttttttttatttaaagaattccacaagtgaagaaatctagaacaggccttccaggcagtgggaatggcagagaaaatgttgggaggctggaaagaaccagtttggaggaatggtcaagttactcagatgctcttgcagatagatgttcttttctttttcgacttggggtcttgcactgttgcccaggctggagtgcagtggcaccatcatagctcactgcagtcttgaactcttgggctcaagtgatcctccctctttagcctcctgagtatctgggaccacaggcatgcaccactatgtccggctaatttttaaaatttttattcttgtagagatgggttcttgctatgttgtcagggctggtctcaaattcctggcctcaagccatcctcccaccttggtctcccaaagctctgggattactggcatgaggccattatgcctggtcgtttgagatgttctgcatgacagagatggggaaactgaggcccaggcaggagcagagatggatggggaccctccatggttggtggcagaagcaggttatgccatggattctgtgagtgtcagaaggaatgcaccccaggctaaatgagggtccctgtcatccctgcgtctggaggcctgggcactgagccagcagagctgcgattcagcacctgctgtaacacaggcattgccttgcttcatctgtgtcaaagaggaaacggaagatggtttggatggaccagggaggggtctgatgttgcttcattcctgcattccacccttgagatccgacttgggcaaacgggactctctgattcttcttcttctttttttttttctttccaaaacattttccaaagtaccaaatgatacttggtaaaaactcattctcggccaggcgcggtggctcatgcgtgtaatcccagcactttgggagactgaggcgggcggatcacaaggtcaggagattgagaccatcctggccaacatggtgaaactccgtctctaccaaaactacaaaaattagctgggcatataagcgggcgcctgtagtcccagcacttgagaggctgaggcacgacaatcgcttgaacccatgaggcagaggttgcagtgagccgagattgctctactgcactccagcctggcaacagggccatctcaaaaaacaaacatagaaaaaaaaaaactcattctccctgcctaccccagagcctctgactccttttctttccttttattttgagacagagtttcactcttgtcgcccaggctggagtgcaatggcacgatcttggctcaccacaacctctgcctcgcggcttcaagcaattctcctgcctcagcctcccgactaggtgggattacaggcatgcgccaccacgcctggctaattttttgtctttttagtagagacggagtttcaccatgttggccaggctggtcttgaactcctgacctcacgtgatccacccacattggtctcccaaagtgctgggattacaggtatgagccaccctacctggccctctgactccttttcattgcctcctaccctacctggggcaaccatgggatgccagtttgtggtggatccttccagaaacagtttacagatgcctgagagcacagatgcttagggaacaaagtaaggactagtgtgatgcggggaaccccaaaaccgagctcagcttctgtctctactatgaaatagttgcggagatctgtcctctccgtgcttctgtctccttatctttttgttttttgagacagtgtcttgctctgttgcccaggctagagtgcagtggtgtgatctcagctcactgtaacctccacctcctgggttcaagtgattctcctgcctcagcctcccaggtagctgggactacaggtgcctgccaccatgcctggctaatttttgtatttttagtagagacggggtttcaccgtgttggccaggctggtcttgaactcctggccccaagcaatcttcccgccttggcctcccaaagtgctgggattacaggcgtgagccatcgcacccagcctccttctccttatctttaaggtgaagataatactagaatctacatcataggctagttgagagaattgactgagtgaatgcatgaaaagttcttgtagcagtgcctggtatacagttggcgctcaatgtgggtgacatttctatcctttcccagccttataaatggcagtatgttttgtacagtactctacatctggcttttttaaatgaataacatatagtattattaactagcatttattgagtgcttactgcataccaggcgttgtattaggcattcattaatttccccttaaccttgaggaaggtacttcattcccgtgtagttcaagggagttgcctcctcctcctcctcctttttttcttttttctagacagggtctactgaggtcttccacctcagcctcctgagtaggtgggactacaggtgcatgccaccacacccagctagatttaaaattttttgtagaggtggggtcttgctatgttgcccagcctggtgcttctttctttcttttatcagctgagtaatatgctagtaggaggtttcatccccttcaatggaaatttagtttgcttctaatatttggtctgttttgttttgttttgagacagagtctcgctctgtcacccagcctggagggcagtggtgcagtcttggctcactgcacctctgcctcctggattctggtgattctcctgcctcggcctcccaagtagctggtatcacaggtgcgtgccaccacacacggctaatttttgtattttattttagtagagacgggatttcaccatgttggccaggctggtctcgaactcctgacctcgtgatccacccgcctcagcctcccaaagtgctgggattataggcgtgagccaccgcgcctggcgtccagccacattctttaactcagcatctgcagaccttccagtcctatcttggccgcctgccagccatgctgacctttcgtttctgctgtgcaccacctgcccttcctctctcctttctgcctagaatgcatgcccccccactcccaatgcactttaggcctgcctggtagccactcaaacagagggctctgggctgggcgcggtggctcatgcctgtaatcccagcactttgggaggctgaggtgggtggatcacgaggtcaggagatcaagactatcctggctaacacggtgaaaccctgtctctactaaaaataaaattagccaggcatggtggcgggcacctgtagtcccagctactcgggaggctgaggctagcaaatggtgtgaatccaggaggcggagcttgcagtgagctgagatcgcgccactgcactccagcctggggacagagcgagattccgtctcataaaaaaaaaaaagagagagagggctctggggctcagctctcaggagtttctctcctgtctctgttcttgctaaccgagaagacttggagaggtctgttcatttctctgtagcctcatttttctcttctggaaaatgagtgttgctgttgcaacaagtaagtctcctagggttgctttgtgggttcaatgagataatacacgagaaaggctcaggacagcctggcaatgattatggctgttcttgtaggtactgcgccttctccttcaccctgttctcatccgatcgttcacatcttgcggccagcacccttgtctaagccaccgtcatgcctcacgtcacctggacagttccaatctccgtttcctcccagcttctgctctctgcccctttctccatgcaacagacaagggttgttcctctaatgagcatgtgaatttaggaagaataatagtaccctgccctttgtgctattgtcacatagatatgcactgtgattaggaaattactaagccaacacctgggaagcacatggaatagtgccgggcaattagaacccccagagtggccctggacctgcactgcccaatatgtgggccacgtgccacaatgcagctacctacgtttatttttcactattttattttattttactttatttattttatttttgagatggagttttgctcttgttgcccaggctggagtatagtgaagcgatctcggctcactgtagcctccacctcccgggttccagtgattcttctgcctcagcctcccagatagctgggattacaggcgcacgccaccactcctggctaatttttgtatttttagtagagacagggtttcaccatgttggtcaggctggtcttgaactgctgacctcaggtgatccacccgcctgggcctcccaaattgctggaattacaggcgtgaaccaccgtgtccagcctattttattttttagagatggagtctcgctatgttgcccaggctggagtgcagtggcacgatctcggctcactacaacctccacctcctgggttcaagtgtttttcctgcctcagtctactgagtagctggaattacaggtgcctgccatcacacccagctaatttttgtatttttagtagagacggggtttcactatgttggccagtctgggcttgaactcctgacttcaagtgatccaccttccttggcctcccaaagtgctgggattacaggcgtgagccaccacgcctggcctcaccctagatcttggaggtctttccacatcattatataaacattctttttgtctgtttttttcctttttgtagggatagggtcttgctaggttacccaggctgatcttgaactcctgggctcaagcaatccccctgcttcagcctcccaaagtgctaggattacaggcatgagccactgcacctggccaacttttccattctttttgatagctgtgtagtattctgttgcctggatgtaccatcattaatttagccagtcccctcttgctggacatgtcagttatttccagtctttggagaggtgctgcagtggcaaactttgcaagccgtttgcgtctgaagatcccggaaaccacaggacgttggaatcagcgtattttttctgcctttctgaagtcaaccagaggaaaggactgagtgagctcatggcaggaacggagctttgtcagctgatgagggagtgacaaggcgatgtcagagcagagggtggggaggctccccttacgagggtctgagtcattctgcagtcaaggattgctgggagcttgcgaaaccagcagaggcaaaatttaccttcatgcgtcacagccaaagggaacattcaaaatatttaacaatgtgctaaagtgcagaggtcccctgggcagggtctagggcctcctgctgcacctagcattaactctttagtgacatgaacatggcgacctggagtgggggtgtcccagagtaggaaacaggaacttagggtgctgggagcgggcaatagaagaagtgggtggctgagggcaggggctgtttaccagtgaaaatatttttaaaaatgttaaccttctatttggaaatattttcaaacttacggaaaaatgacaagaatggaacaggctcatatacatatacattttacctagactctccaaatttactgtatctgtctctccattatccatccatccatccatccatctgtccatcgattcatccatccatccatccatccatccatccgttatctagctattttttttttttagacagagtcttgttctgttgcccaggctggagggcagtggcgcaatcttgactcactgcaacctccacctcccaggttcaagcgattctcctgcctcagcctcccaagtagctgggactacaggcacacaccactgggcccagctaatttttttgtacttttagtggagatggggtttcactatgttggccaggctggtcttgatcttctggcctcaagtgattacaggcatgagccaccatgcccagcccattatctatgtatctatcatctatctatctatcatctatctctcaatcatatctccatgtatccattgtctgtccatcagtcatctatctgtccatcatccatgcatccactcattcacccattcgttatctatccatccgtttatttatatccatccatctttctatcacctttttttttttttgagacagagtcttgctcagtcaaggctggagtgcattggcatgatctcagcttactgcaacctccgcctcccaggttcaagtgattctcctgcctcagtctctggagtagctgggattacaggtgcgcgccaacactctggctaatttttgtatttttaatggccttttgtgactggcttctttcacttagcatcatgttttcaagattcatccacattgcagcatgtgtcagcacttccttttcatagctgagtaatattccaccacgtggctaaaccccacctttttcattcactcattagcagatactgacatcttatctttcaataatttactcatggatatgattccaccagtaaatgcccactgcccatagcctggctaaccttgggcaggtgcaatgtaagggaactagaaaaaaaaaaacaaaactatccaggcatggtggcttacatctgtaatctcagcactttgggagttcaaggcaggagggttgcttgaagttaggagtttgagaccagcctgtgcaacaaagcgagacccatctctaccaaaaaaaaaaaagaaaaaaaatacaaaaattagctgggtgtggtggtgcacaattgtagtcctagctactcaagaggctgaggcaggaggattgcttgagccagaggggctggggtgacagtgatccatgattgcaccactgcacataagcctgggtgacagatcaagaccccgtctcaaaaaaaaaaaaaaaaaaaaaatataaaacggggctgggcgtggtggttcatgcctgtaatcccagcactttgggagaccaaggccggaggattgcttgaacccaggagttcgagaccagcctgggcaatacagtgagaccctcctctttaaaaaaacattaaaaattagctgggcacagtagtatgcacctgtagtcccagctgcttgggaggctgaggcaagaggatcacttgagcctgagaagtcaaggctgcagtgagccaagatcacacccctgagctacagcctgggtgacagagtgagactcagtctcaaaaaaaaaaaaatatatatatatatatagtggttcagggatgtggatctgagctcttcaataactgacaaataataataccaatggctgccacttcttgtcctcttctctgtgtcaggcgctgtgctaggtgcttaggcatttttcatcttatttaatctttgaggtgagtgttttaaaggtagaaaaaccaggccgggtgtggtggctcatgcctgtaatcccagcattttgggaggccaaggcaggcagatcacgaggtcaggagttcgagaccagcctgaccaacatggtggaaccctgtctctactaaaaatacaaaaattagcagggtgtggtggcaggtgcctttagtcccagctactcaggaggctgaggcaggagaatcgcttgaacctgggaggcagaggttgcagtgacccgagatcgtgccactgcagtccagcgtggcgacagagtgagactccatctcaaaaaaaaaaaaaaaatgtacaaaactccatctgcaaattcaaatatttagagctgcaaatacagctctcagtatttccagaatgatttctatttcttgctgtccccttttctctgggttggtgtcaaagtggccttcaggactgggctagctccataggtcacaaaactcacctcttggaaatggtcaggggcagcctgtctggtttgcattccagcccgtatgggttcacatcctctctgagtgacctggaacagcctacttcaccttctggtgcctcgtgcttcttcatcagcgaaatgggcatttttttttctttcttttttttttttgaggtggagtctcactctgtcgcccaggctggagtgcagtgtcgctatctcagctcattgcaacttccacctcccaggttcaagtgattctcctgcctcagcctcccgagtagctgggattacaggtgcccgccaccacgcctggctaatttttgtatttttagtagagacggggtttcaccatgttggccaggctggtctcgaacccctgacctcaggtgatctgcccaccttggcttcccaaagtgcttgggttataggtgtgcaccaccacacctggcctgaaatgggcatattaacagaacctccttgtaggttgtggtcaggatggaaagagcaaattccatgccgcatgcatagtaggtgctcagtaagtactggctgctttcgggtgatcactcagtgccctgatgggtgctttactgcagtgtctggtgcctctggacacagatttcacctacaaggctttctccagtccagctgccatggactgcagcctttctttcttgggtgcatgacagcttccttcagctctgtctgggaagaagtgatcaggacctttttgttctatttttttttttttttttttttttagatggagtctcactctgttacccaggctggagtgcaatggggctgtttcggctcactgcaacctctgcctcctgggttcaagcaagtcttctgcctcagcctcccaagtagctgggattacaggcgcccactaccacgcctggctaatttttgtatttttagtagaggcggggtttcactacattggtcaggctgatcttcaactcctgacctcgtgatccacccacctcggcctcccaaagtgctggattacaggtgtgagccaccgtgcccggccagtagggctagactttgacgttaggctgctggatcgtggggaagcccaggggcttcgcaggatgggactgaggggagaggtggcagactggcaaggggtccaactagcatggaatcatttcattttttttttttttttttttttgagacagggtctcactctgtcacctaagctggagtgcaatggtatgatctcggctcactctaacctctgcctcctggggtcaggtgatcctcctacctcagcctccggagtagctgggactacaggcaagtgcaaccacgcctggctaatttttgtattttcagtagagacggggttttgccatgttgcccaggctattctcaaactcctgggctcaagcagtccgcccgcctcggcctcccaaagtgctgggatgacaggcgtgagctacggcatctgcctcaatattttaataagtggtgtgacaccctagttgactctcagccctcagcatccccatttcctagtgagaaaaagccacacaggggaaaagccacatgcctgagccaggatgccccctacccgggcacatgtctgcagactcatcctctctgctctctccgattccccttaggactccttcaattataccacccctgattatgggcactatgatgacaaggataccctggacctcaacacccctgtggataaaacttctaacacgctgcgtgttccagacatcctggccttggtcatctttgcagtcgtcttcctggtgggagtgctgggcaatgccctggtggtctgggtgacggcattcgaggccaagcggaccatcaatgccatctggttcctcaacttggcggtagccgacttcctctcctgcctggcgctgcccatcttgttcacgtccattgtacagcatcaccactggccctttggcggggccgcctgcagcatcctgccctccctcatcctgctcaacatgtacgccagcatcctgctcctggccaccatcagcgccgaccgctttctgctggtgtttaaacccatctggtgccagaacttccgaggggctggcttggcctggatcgcctgtgccgtggcttggggtttagccctgctgctgaccataccctccttcctgtaccgggtggtccgggaggagtactttccaccaaaggtgttgtgtggcgtggactacagccacgacaaacggcgggagcgagccgtggccatcgtccggctggtcctgggcttcctgtggcctctactcacgctcacgatttgttacactttcatcctgctccggacgtggagccgcagggccacgcggtccaccaagacactcaaggtggtggtggcagtggtggccagtttctttatcttctggttgccctaccaggtgacggggataatgatgtccttcctggagccatcgtcacccaccttcctgctgctgaagaagctggactccctgtgtgtctcctttgcctacatcaactgctgcatcaaccccatcatctacgtggtggccggccagggcttccagggccgactgcggaaatccctccccagcctcctccggaacgtgttgactgaagagtccgtggttagggagagcaagtcattcacgcgctccacagtggacactatggcccagaagacccaggcagtgtaggcgacagcctcatgggccactgtggcccgatgtccccttccttcccggccattctccctcttgttttcacttcacttttcgtgggatggtgttaccttagctaactaactctcctccatgttgcctgtctttcccagacttgtccctccttttccagcgggactcttctcatccttcctcatttgcaaggtgaacacttccttctagggagcaccctcccaccccccaccccccccacacacaccatctttccatcccaggcttttgaaaaacaaacagaaacccgtgtatctgggatatttccatatggcaataggtgtgaacagggaactcagaatacagacaagtagaaagattctcgcttaaaaaaaatgtatttattttatggcaagttggaaaatatgtaactggaatctcaaaagttctttgggacaaaacagaagtccatggagttatctaagctcttgtaagtgagttaatttaaaaaagaaaattaggctgagagcagtggctcacgcctgtaatcccagaactttgggaggctaaggtgggtggatcacctgaggtcaagagttccagaccaggctggccagcatggtgaaaccccgtctgtactaaaaatacaaaaaattaactgggcatggtagtgggtgcctgtaatcccagctacttgggaggctgaggtgggagaattgctcgaacttggaggtggaggttgtggtgagccatgatcgcaccactgcactctagcctgggtgaccgagggaggctctgtctcaaaagcaaagcaaaaacaaaaacaaaaacacctaaaaaacctgcagttttgtttgtactttgtttttaaattatgctttctattttgagatcattgcaaactcaacacaattgtaagtaatgatacagagggatcttgtgtacccttcacccagcctcccccaatggcaacatcttgcaaaactacaatgtagtctcataaccaggatattgacattgatacagtgaagatacaggacattctcatcaccacagggatccccaggatgcccacttccctccacccccacaccccagccgtgtccctaacccctggcaaccaggaatccactctccatttctataatgttgtcatttcaagaatgttattcaatggaatcatatagtatgtaacctgttttgagcttaaaaaaaaagtatacatgactttaatgaggaaaataaaaatgaatattgaaatgtt

SEQ ID NO: 183 - DNA, 63303 bp, Homo sapiens
cgcagtcggggggaggcggcggcagcggcagcggctgcgggcagcgcgcggggcgcagggcgcggggcgatcaccgtcggggctcgggaggcgggcagtgggcacaggctccccggtgcccgcccctccgctgcggaggggggccgcgagcgggcggccggggaggggccggcaccgccgccacaaaatgagcctgctgtcggccatcgacacgagcgccgcctcggtgtaccagcccgcccagctgctcaactgggtctacctgtcgctgcaggacacgcaccaggctagcgccttcgatgccttccggcccgagccgaccgccggcgccgcacccccggagctggccttcggcaagggccgccccgagcagctgggctcgcccctgcactccagctatctcaacagcttcttccagctgcagcgcggagaggtgggtgcccccgcgcgcccccgcccaccgccccaccgccccaccgccccaccgtggcgggccgttccctgtctgacccgctcttcctggcctggcgcggcccggctccgcattgccgggcccggcttggcttggcttcgttcaactctgccaaactcgccgcccgaagtccccggggtgccgggtgcgcgtcacctcccggctgagcccgggctggagcaatgcaggccggggcggagctctcccgccccctctccctgccagggcagccctgctccaaaggggttgggggagggagttgaggaggggttgtctccggattttcttcagacagctggggtgcggcctgggcggggagccccttcgaagtgtccttctcacgcccaaccttatcctcgtcctggccaccgcgggctgggaccgagagtgcagattctgctcggagctcctctggaagggcctaaaatcttttctccgacctctgcggttcccgacccgaaaggcaccctggagagcagtgactgcccagagggcttctcctgctgttctcactcggggaccccagatacgtcctccagctgctcgccctcccccagccacataggaagtggtttctgagggcttgaccccacagactgcgctgtccccagccctcccagcctcgaaggaaatgaaagggaaatcctcttgagctcttgggaggggggctagaaagggggggggagaggttccagctgcccagcgccttctgcagaaacctgggccggctgtgttgcaaagtctgcctgtttggtggattcagttacaaagttgactgggcagcgcctctttgccagcaagataaatacacagatcgccaccacctcccagccctttttgaagagtctccagggcctgcccagataccactcctttccgtgggctggactcctcccctccctccatttactcctgcctcatttgggaatttcagacacccatctgtggccttcacttcctccccttgtgggggttttctctgcaaagatgcaagaggtgtgttcgggggaggacacacatgggggtcactttccttccagacctgggcacaccggtgagttttaggagagtcagagtcctgaatgggttggggaggaaagcctatgtacgcaagggtgtgctgggggtaagagagggaggcagagggtcgcccttgagttcaactctgccattatttactaggggaggcatggacatataaaatgctggcccaaggccaacactacccaggctgacctgttgacctgggtgggtagaacaggcgtgggagggggctgggtgcagaggaggaagatgagtctgaaagtgcaccctttggtgtcaggcaaaagcatttctatgccaaagctctttgtaaactgtaaagcattctctccacgtgaggaatggttcttggctggggatctttctttcttgtaagagacttttctgcctcttcagggaattggcttcaggtgaccagtgactggaggaccgtttgtggggtgtttctttggtgcatgcgtcttttcagttgtttgttctcttaccaaacatttgttgagctctgggcaggacccggggattcacagccacaggctagtgggggccacggatgagtaaacagacaaggtgatagagggtatgaatggtgggtgatttgatgggggtgcttgtgggagccccacgggagtttctcaccctgggagaagggtgaacatgacccacaggtcaagtgtggacccctaatcaacctcttctagcctccctctgctccccctaccatggtggcattgttccccacctgtgggtctcccctgagaggacctgggagtttggaaccatcaagagtaccctataagaataggatgttgtgctgctttttgaaaatttctggcatccaggatcccaaccggagctcagtgagaactgccctctgtcacttcattgctgcgtacctcagtttccccataaagtcacacagtgtgaaaggagcaggaaaaggttatactgtatagtgcagtggtggggaaatgtctttcacaacctgacttcagggaaccccgtctctctctgggccttagcttacctatctgttaaatttagtctctgctacaccccaggatggtatatctatagtatttgagacctgttcaaacaagagagggctgggggagtcaagaggggcttctctgatgttcacaggccagtggcttcctcggaggtgatggagggctgtgcctgctgacttccggaaggctctcttggcttcaggctcactcatcctcaccccccacccactttgcctcctaaaccctctcaaagcctcagctgtgttcctgaggacaggcctttcctgcgcccagggcttagctggtgacctaatatggctccaaaatagcaactggctgagaaggcaagaaaaaataccccccaccccaatgccaccaaggggctggtcggagaggaagcaagtcgtgtgtgggccggaggggactctacggagggacccagggggcccaggagcatcaccattctgtgcgaggcctggcaggcccagtggcagtgcctgcggatgtgacttgcatgctgaccactgaccacggcctgtctgcgccaacccctgtgccaagagcccaccccctcctgcaccacccccaggctgctcccaccacaatagcaaaacaccatgaatgcagctgggatttgagggggggtgaggacatgggggcacagaagcccattgtgcccctggaacctcagctctggaagctgaagataagccaacggttctgagtggcacactggccctgagagcagagagagagatggcagagttcacaccagagttcctggtgcaggagcaagcaccaggaggtgacttggattcttgtggggacttcccagcttgtggtgagggtgccaggccaaagcggacacaagcaccttgcacagtttcttaaaaggcttctgggtctacaaactaggccccgtgaaacccagtttcaaaaacctgatctacggcaacaacgatacatttttggaaagggattcctaaggcccttggctgagccccttctctctctccaggtacccaaggaaggcagttcttagatggagtaggggctgggctgcatggggtcttccctgccaagtcttgtttggaacttaaattcacaaccgtaaaggggctatgggagtcatttctggaaaagctgagttacctccttgtgaagatggcctcttgggccccttgaagggctgcccagagcccctgccaggtagtccctgtaccctccagcctccagggagatgtggctgtctcactccattcaggtagaattcttagggcagctgttctctttccctctttctccagggacagacgtagctggaaggtgtggccctactgtcaagagacccccactttgtgaatgttgggggagggactttgtggtcaaatacatttggaagacacagtgtccttcctttcccttggaaacacacagtgcccactagcacaggaaaggccctgagaactcctgcagtgcaaaacctgttaacctttcttcagcttgacagttcccacacctatttgagcagagaacatttttggctcaggacacctgtcagtgtccttcctggaaaacctcttcattgttggatagttccaacctttaggaagctcttcctagagcatcagcctctgcagcaatgaacctcctctttgctgctcaggtctacccattggaggtttgagaacagtagcaagggtgtcacaaggcttaacaaatggcctttccctgggcccagcccttctgtatggacatggccattaaaacccttagaggagtacatacagtgtcctcctttaaaaggccccagtcttgacagttttccgagggtttggatgtgccctcaacagacggagataagcccacgggctgcctgaccagtgtggatgtgtggaacaaagccacatttctgcccaagaatatgaggtgcctatgttcgagagtgggcttaaggagctcaggtgggttcccagcagcctttgtggtgtgtgtgtgtgtgtgtgtgtgtgtgtgtgtgtgtgtttagggggcagctccagggcctgagagtaatggccattctatcccagcccagagttcgggaggatgctcccagctctcttggccacccttgggaagctgaagtgtgactcaggcaaggaggaccgtcatttgagaagctgttggctgaggcaacctgaccctccctctgtcagattacgttgactggacaggcatggactcagagggaagaccacacctcgtggaccttctgagtcaggtgggagggaggaaagcagacagcattagtaatcagtaagtggcagcagcagggagccagatgctgtcagtacccagaggagggctccgggaggagatggccctagtggaacagtcctctgctcttgggtggtgctctattcatggcctctctttcctcatagcttccattttttgcagaagaggacacagaggcctggcaagtcacctagccagtcagtgggagagctagatctagaattcttctgtgttccagctacgggttgcatctgcgacccgtcctgcaattggtccccagatttgctctcccctggatcagcctctgggtcccagtgagggcaggcagcaatccgtctggacggggccatcctatcaagcctcagtgcctccgacattttgtccctggtcctcaaactttctggaattgctgagtactggtcatgagtactgggtttcctaccatgtccctgttccagccactccccatcaacccagcatgggggcatgagtccagggctggcctgctttaggagaaggagagaagatgggcactgagcactttctactgcttctgcacccatatcctagtctgtgtgcagcatccgcattgtctggatggggaaactaaggctcttctaaagaaagacaatgcattcagggaatcagaggcagaaccaagactccagcctaggtctcaggtcctagatctgttgtgtgtgtgtgtgtgtgtgtcgtggtggtggtggtggcatgtgattctttattcagccctcctctggccatactggtctacttggggtttttgaaaacatcaagcactccccctcctctaagcccctgcacttgctattgctgctacctaaaatgccattccctgcccttgtacatggacacattccaactggcttctttatgacacaaatggatgtcctttctctgaggggttttacttggctgccactgggagcagacctctttccagctgctgtgagcctgtgaaagatgagttgtaggtgctctggtaaagcatgtctttttttttttttttttgatggagtctggctctgtcacctaggttggagtgcagtggcacaatctctgctcactgcaacctccacctccccccaggttcaagagattctcctgcctcagcctccccaatagctgggattacaggcgcctgccaccacacctggctaattttttgtaaagcatgtctgaaggattggtcttgttctgtaatagcaatatgtgtgtctgtctcagtagttagattgtcagcaccctgagagtaggaatcttgtcttttctacttagtagtcctggcatctggttcttagcgtgcaggacatgctagctgcttagttaatgttttctacgtgggtgggtgtcttgaattgtaacctcccctcctcccttccacctcctgacttgtgagcatgtaagtactctcctgagcctcttcaccttttgttttgtctcacagaaaaaaatatgtatcgatttcttgattcattggaatgagctgacttgggagatagtgaaaccttgtcccctacaagtgtttcagcagaggcttgggtatgctgatgaatggtccttgaccttctttggttagggacctctttgagaatctgaagacaactagagtttctgctgccagcacaaggcacagaacataagcatgcgtgcacatgcatatacacatgtttgcatgtgatttcagtgggatcacacacaccttcatgcccacagtggatcacagatcaaggatccctgcaatggaggctgcaagcctcagtggtactccagacagagtacagtctagctaaatatgcgggtcctttccagtcctgggattctcatattcttgctctctgctttcattcaacaaatatgctctagcagtaagaggcagcccggtccccagtgcttacacactagctgggcagagggcttatagctgtgaaacgtgagcacctgtcaggtgagtggtgaccctgggctggagctgttggaaccaaggaggaaagggatctccccaggtctcctctgctttgtcctgctggcactgtctgctccccctttcctgggtcctttccctatttctctctgcccactcccccaccaaaaataacctagacttgtgatttaaataagaatcttttgctaagcactgactgtgtccagggaactgtgttttacatttgctgggtgaatgggcctccaggaggcagtggtgccctctggagtcctgggtgaagggttgctgtgcctgtcgtggccagcccagcactgtcctggcccatgggtcagctttagacctgggaaacaaacagagccaggggctgagcacagctgaaaaccctcagtcaaggtgtggccatgttttcccattggctcgcttcccgccttgcccacgggctatctccttgtctccctgagaccggctggtgtccacctctgtatatatcggacatgtatgtgtttgaccagccgcagatagatgcctggggtggaggaagtacagatccccttgggagcagggtggattcatttgcgagatgaatgatctcttgtcccaaacagaggagtgtgggtgcgtgtgtgtgtgcgcgtgtctgtggggtggagtaggggtggctttgggataagaaagcggttgttcagctgatgaaaggaacccctacagagctagggactcgaatcagagttcctcctccggggccttctcaggcctggggagcaggactcagcccttgcttctgccgtgcctggtagcctggcccagacgctgccttttccatggtctcactgtggccatgtccttcccagcacatgctgctccccatcctgcctgctgtcactgcctctcctatctgtctcttgtcctgtttctgtgccctctcttctccctctgggctgccctctgcagcttctaccctcctgccctaactcctgctacccctcacctgctgtgcctacctactgtcctgcagggaaggaagaaaagagaagaagtccctcttgtcaggcttgctccggggagaactggagtcagccttggaaatctctgtctctgcaccccgtattctgcagcagaaccaccatgcccagggcctgcacccctcatgcagcgcagagacactggtccttcatcttgccagggccgaggggcctagcatatgatgtcacagggcctctgtgccaagtagagtggtccgcacctggcattttcctctgactccccttcctataggggaggtcaagccttggaggccatgtagaggctgaaatataacagggcaacacgtgctggctgcgttaccttgggcaaatcgctcagcctctctgagcctcagtttctagctctataaaatggggccaataatgcccatttgaatagtattcttgccaggtaagaggggactaagaaaggtaaaagatttagtcaaatatatgacacaccgcatgatcagagtaaaccacaggccgagcacggtgactcatgcctgtaatcccagcattttgggaggctgaggcaggcagatcccttgagcccaggagtttgagacctgcctgggcaacatggtgaaacctcatctctacaaataataaatacaaaaaatcagccagccgtggtgccatgtacctgttgtcttagctacttgagaggctgaggtgggagaatcacctgagcccaggaagtctaggctgcagtgagctgtgattgtgccactgcactccagcctgggtgacagagtaagaacagtaagaccctgtctcaaaaaaaaagtaaactataacgtcttcccaccttcctttccccaacagccaagcaaaaaccttggagaagttccagcactgggcaggagtgtgatgcatggtcccccagatgcggtgtgagggtcacatccttcctgctacctgctggggtcactgacctagggaggaaagagaggtggcctcttccctaagcctggtgatctgggcctagatggcccaggggcttccacttaccccataagtggctttgccctgcaccagtgcccagagcagcctaatctaaggtgggagtgcccctccactcggcccatggaaatgagaccgctagggcatctgttaccctatctgtcaattgggcaggcccttccctgctggtgaccatcgcacccagggcaggctgtggggcaatggagggttgcagaacctttgtcttcagggatgtccagccttgtgggagaggtgaggaggcctcacacacggggagagattagagagcgacttcagagctccattggtcactcaggcggggctgcgccatgatccctgcgccccctcctgccaaccgcagtgctgactgggctacgctggggtgggagaggtcagcaaggcctctggtgggagtcggggcctctatggccgggggtgcttcaggagcacctggatctgtgcttttcatgcttttccttggagcctgaggcctgagtaaggggaaaggatgaggtcaaggccacaaccctggagttagagcccgatctggagccaggccctggaggggttctggatggacatagagaagggcattcccaggctgaggcagcaagtgtgggctggagggagaaaggcagagctgcgcggtgggcatggtgagaggagcagggttagggctgacagatgaaggcttttagggccaccttgcactccagccacagaaggaaggccacagaacagatggtgcctgtgtcggcctctgcatgccaggctccaggggcgtctctcaggacccgggtgtctggaccctaggaaagcaggaccacagggatcagcaaggtcacccttcttcccccttccccgctccattttacactgtacagatgggaaacccaagaggccaagccccagctccgagcaggagggggatagagctctgggtcctggcctctgttccatccagtccccacaggctgtggaaacaaccaggagactgatttgcctttcacctccctggcctgagctcaaacggggcctcagagaggaagcagctcactgcctcacccacccttcacactggccagccaagcaggatttctggccctggggcctggctgggtaccctggtctgcgtccctgtgcccctgtgggcctcagtttccccatctttcatgtgggaatgaggtagggtcagctgacggtctctaccctttcggctctaaggtagcgttcgtctggaattagggctgggggatgggccctaattccctggagacaggctggagggcactagaggtgggaaggccatgaggaggggaagctctggcctcacttctctcactgtggagctgcctggggcaggggcaaggctgcggccctccagagggtggggtgtcgagctgccaaggagagggcacccgcttagaggcctctggctgcccagggatgcctgtggggccgtccgtgggcaggggactgtggccgcaagatgggggagaggtttttcagggtgtaattagtgcactttctggcacccaccaaacttccccttcctcttgacaatttgctgccaaacagcctgattcctgtggacttgcttaaatcttatccaggggaaaaaaaataaaaataaaaaaaaaagaaagaaagaaaggaagaaaaagaaaaaaatattaagagggttgttatttgtgaaattgtgtttcccagccatgagggtgagtcacaccatttggggcttcaagtttcttgtttggatgaacttttctctgggaggctggggcggatttggagggggagggggccttctggtgtggggaaagtcttcgagtcaagataaggggagaccctggtggttgggaagtccaggtgctccaaggctgggtggggctgggctggttgtacctgaattgcctgggggagcttgaaaaatacagattgggctgcagtaggcgggggcgttgttgtttcacgggcatggagtttcagtttgagaagatgaaaaagttctggagctggacggtggcgatggctgcacaacagcatgaatgctcttaatgccactcaactgtacacttaaaaatcattgaaatggtcaattttgttgtgtatattttgccgcacacctaaaaatacagatttcgggccctcgattccaggtggctgctttggtaggtctgaggtggggcccagaaaactgtttgttataagcttcccaggtcattcaatacaggttggggcacactcatgtaatctgtaaaatgggatagtgactcatagagttgtgggcagaatcagctatctgaatacgtgtaaaatttccagtgctggggtcacagtaagagcttggtctgtgtcactgttatcctgtgatgtggtttttatcagaactctcccccatgccgtggaaggttgacccccattggctcccacagctccagggacgggggaccctctgcttctcaaggtggactgctccatcttggattcatctgagagctggagtgcccatcaggctgaacgcaggtcaatgtggaatcttccactggtcctggatttggtggtcgggccaggcagtgatacagaagttacagtcagttggacccattgaaatccttcccagtcactataggtgactgtgtgctgggctggcctgcccccgatgtggtgtctgtgtctttccttccgcatcccaggctctgatccagatgcacacgagacggaacagagtcccagaaggaaagggctgtggtcacacagccgtgtgtcctgaggcaccaagaacatcagtggcacccagatgatgaggaccatgtctctaggaggggagtggcagatgcctgcagatggatacagttgggtggctgggacacatacttgtgcaaagtaggatctgcttcagttgggggaggcaagactgtgccctgtgccctggggccagcttgcagctcgcctccctcccctgcctatgctaagggaacacagaaaggactgtccccaacctgggcttctgtctgccccatctttgtaagggagcctgaggcccttcctttcagaggccctgtttccccttcagcctggaactccccaaaacaaatccttgtctccccatcagacacaaggccccccaaggtccgcagcttattcctgcagttcttgggcacctgtgctggggccaggagatacttaagccccaagcccagatttgttgttgaccctcctggggaggccgcctctttcagccttggccttgctccaggaaagggggacccctggctgctccctgccagccccaccttcgctaaattccagtatgcaaggcagcccggagcccgtgactcctataaatagaggctgtatataccaggagggggcctgggccacgtctgctttgaagctaagcaagatgtctggttcctgtcatctggaggtgagagagatggaccacttccctccttgggcttccagagaggtggtttagggccaggctgagggctccccacacacagactacacaagcctcgggctgcaggaaacctggcaaagggctgggcttcagtcttgtctagtgtgaagcgggagcaatgccgcaagctgacattccctttccttacaaggtggggaaactgagtcagcagtgactttcctaaagtcaccccaccagttagtggcagagccccaaatctgacaggttgctttctactatatgttcttacctcatggcagtatgttaagaactaatggtaataataataatagccatcatcaacatcattgccatttactgagtggttctgaagtgccaggcatgagataaactactttccattcatgacctcattttagcctcatagaaaccctaggaggagctgttactaggaccattttgcagatagggccactgaggcccagagtagttaactggcttgtccatggagacacactagttaggatttgaactcaggcttctggagcccagagccctcgggtagctgaagactcagtgtgaatccatgcgtgtgtttgggtggggggttatggaacttctcccaaggcagaggctgtagtatatgtgcctctgtctcccacaggcgctgagcaacagtgtgtacaagggcgcctcaccctatggctccctcaacaacatcgccgatggcctcagctccctcaccgagcacttctcagacctgaccctcacctccgaggctcgcaagcccagcaagcggcccccacccaactacctgtgccacctgtgcttcaacaaaggacactacatcaaggactgcccccaggtaaggcagccctggcccagggggtgctcttgggctcccctactgacctgcggacaggctcctgtgggtagggcaggcgaagcagtgtccccagggccccttccaccaatgagtggccccgtggtcctctggcctctacccttttgtccctgctgggatttctgaggcaaggctggctggtgtggtcaggacagaggcccatcttgggcccacgctggttggtcagcaatctgggtgggggatttttggacccgaactgggcccccaaaggaggttctgtgcctttgggtctccaccagtcttttttgctaggtggggcctgttctgagggggcagtctcctcacagctccctggaggccccatctcatcacattcacggggaaggaatgcaggctctgggccaggaatccagatgtgcaccccctcccctgaaccccacctctgcctcctcagcctgtgagggaagaggggaggggccctgccccacactctgtgctcccaggatagggctgggggaaggcttcaggcactgcagggcggagcatctctttcttggagtgagaagggagggtcgggcagatcgaggcccccacctgatccaatgcttcagtatgacagagtgggcctaccatgccagcccacctacaggatggtccctgacccactgatagacatggttttgggatcctgggaaaagagggtagtagtcattttaagtacagcatgagattatcagtgattttttttcctattagtttttcctattttccaactttttttataatgtggcattacttttattttacgtttgtaatggaaatggaatcctggaaactctggaaatgcatgtagtgttcccctccagatgttggaaactgacgtgtggttgggtggggctgggtcccttcaggaccagtgggaggccaaaatgtgctgtcattcattacattcccaaaccctgctcagaaacggccacaccatgcttcaggttcttgccgcttagagtacggccctggcagagatgcatcagtgcctccagggagctattacaattgcaggctctcagagcagcatcttagcaaggtccccaggtgatctgtgtgcccccatcccagactctgcatacatagtgggagctgacccactgacgactttcctgcagaccccacatctccagtgggtcctgtcctccccctcaatatacacagtaagcaggaggctattggctcccagcagagagtgagtaccctcagcccccctggggttctctggatagaatgaggggcaaacaggcaactgaggatctagttggtccttaagggcatgctcatggcctgtgcagtccatagcctgttgcactttgtccagctgagccccagcacaggggcccccagctcatgtgcacacagccatccacagcagccctccctcatcccctgcctacagcctgggaagtgggcagagccagactgagctccgttaaggagacaggcactgtgctgagtgctctccaagcagtatttcatttaatgaaactactctatgtgttaagtgctctatttgcctcattttccatggggaaacagatgcttcgagggaggaagggactcacacaggattattgagctatcaatggaagagctgggattttaatccaggcaggcaggtgacactcagacatcaacaggggctctggagccccgaggaggtatgcttactctgggctggtagcctgggaatgctaccaggagaagggctttggagaagggtggcagggcctcccccagggtgaccaatatccaaaggcaatggatgtgagccagaggcccggggatagcagagggtgtgtgtgtgtgtgtgtgtgtgtgtggtgtgtgtgtgtgagtgtatgtgcacatgcatgcaccatcctctctcctgacagggccagcgctcttctaaatgctggggcagaaggtccctggcaccttccagcacagtgctaacgtgggatcttccttcatagagatcatcatctcatattggactcttaactctacggcagaaggaggagcagaggcctcattttacagtcttggggaggtggagagggcagaatgtatacgagatccccagtctcaggatttctgtattctttgcctccttaagctccttgtcactccaagctaagacctgcatggtctgtggggcctcagtttctcactcaagctgattgaggccttctcctggctccattccaaacttgattctgtcctggactcgtgaaggcccaagcaccttcttcctcccttcatgagtggtgggaggacagacagaggctcgcagcatcagtttcgtcgcctgtcccatgaggctaaggagagcactgacacccagggtattgtgaggacatagtgaaactatgcatggaaggtgcttagcacagtgcctggacacaggaagtgcttagtaaatgttggctagcatttttttctcctttgggtcactatgaagagtgcacccatctggcaaggcactaggtatttgggcaggctagaacctgattggatgctgtctacccctcacctggccatagctccaggggcaggtgctgggctggattcatctctgtgctcctcaccatctgaccacgccagctcaagggacctcacacgcagcggtgctcagtgcaaggctccctgaagggaggaacgggttgacagggcttttataaaccacagaaagaaacctgtgtcacaaatgaaatagtgtgttagaacctaatttctataatatttaaaagtagaaggattttcttgggaacagctttatgagatacaattcacttcccatataattcccatttgaagtgtacaattcagtgattttcgtatatgcctggagttgtgcagctgtcacctcaatcagagaacattgtcatcaccttgaaaaggaatttcatactccttaggtatcacctcttttttttatttttttgagacagagtctagctctgttgcccaggctggagtgcagtggcatcatcttggctcactgcaacctccacctcctgtgctcaagtgattctcatgcctcagcctcccgagtagctgggaatccaggtgctgccatcatgcccggctaatttttctgtttttaatacagatggggtttcaccatgttggccaggctggtctcaaactcctggtctaagtgatccacctgcctcagcctcccaaagtgctgggattacaggcatgagccacctctcctggcccagatgtcacctcttgatcatccatcccctcgcatccataaccactcatctatttctctctctgtagatctgtctattctggacatttcatataactagaatcatgtaacatgtggtcttttatgactggcttctttcacttagcataatattttcatggttcatccatgttatagtgtgttaggaagtgttccttcctgttatattttctggaagagtttgtaaagtatcagcagtaattattttccagatgtttgatagaattcacctgcgatgccgtctgcgcccgggctttcttttgtgggtagatttttgatgactgctctgaactctttactcattatagagtattctgatttttttttatttctttttgactcagttactacagtttgcatcttcctaggcatttttccattttatctaatttgtctaatttgttggcatacagttatccatagtattcttttataatcctttttatttctgtaaggtcgttaataatgttacttctttcatttctgattcttgcaatttgagtcctctctttcttcttgtttaatctacctaaagttttgtcaattattttggacttttcaaagaacaaacttttggtttagctgattttctctatttttttctattatttatctcattaatttccacttgcatctttacttttaaattatatttaaaatacatatggcataaaatttaccatcttaaccatttttagcttacggttcgtggcattaaatacattcacatcgttgtatgaccatcaccaccttccagccacagagctctttttatcttgcaaaactgaaatttatcttgcaaaactgaaatttatcttgcaaaactgaaatttatcttgcaaaactgaaatttatcttgcaaaactgaaatactgtacccattgcataataattctccctccctgccccccagcaaccaccattttaccttctgtctctgaatttgactactctaaatacctcatataagtggaatcacatggcgtttgtcttttggtgattggctcagttcacttagcataatttcctcaagtttcatccacactgtagcatgtatccatttcattcctttttaaggctgagtaatattccattgtatgtatataccacatttttaaatcagttcacccatcaatggacaactggattgcttccaccttttggttattgtgaatactgctgctgtgatcgagggtttataagtatctttgctcgctttcaattctccacttcaatatttattatttccttccatcagcttgctttagatttagtttgctcttctttttctagtttcttcaggtggaaggttaagatactgattttatatccttcttttcttttccttccttccttctatcctttcatccttcctctttttatggagacaggattccactctgtcaccgaggctggagtgcggtgctgtgatcataactcattgcagactcaaactcctgggctcaagcaatcctcccatctcagcctccaaaagtgctgggattacaggcatgatccattgtgtctggccccttcttttctcaatgtagataattacagctatgaattttcctctgagccccatcccataagttttggtatattgtatcttattttcatttatcacagggcattttttttttttatttcccttgtgatttcctctttgactcactggttatttaggagtgtgttgtttaatatccacatatttgcgtgtttcccacacatcttttagtgatttctaaccttattccattgtggtcatagaagatattttatattatattaacccttctaaatttattgtggtttgtttcagaacctaacattatgagttattctggagaatgttttgtgtgcacttgagagaaatgtattctgctgttgtttggtggagtgttttatagatgtctgttaggtctagttggttcatagtgatgtctatgtctcctcctgctttgttgatattctgcccagttcttttattattattttaagtggggatatttaagcctccagaaattattgtttgtctatttctttcttcaattctgtcagtttttgcttcattcatttgagtgttctattattaggtacacctatgtttatagttgttgtatcttcttgatggattaatcattttatccttataaaatgtccttctttttctctagtaactgttttttttttgttttaaagtatattttgtctgatattagtatacctagctttctaatagttgcagattacatgacagatattttcctatcttttatttccaacctattcatatatttgaatttaaagtgcatctcctgtagatagcatatagttgatcttgttttttgttgtctaatctgaaaatccttgccttttgattggattgtttaatccattcacatttaatgctctttttgacgtagatttaggtctgccattttactgccatttgctttctaaattactcatgtcttttttatttctctattccttctaaagaataacacaataaattgctttcttttgcattgattttctaactaacattttaatttctttaatgattttttttcactatgttttgtgagttatttttttagggttgctctagggcttatcttatacattgtgtcttaccagaatgcctcagatttataacttgattccagtgagatagagaaatgttactcctatgtagctctattcgctccttgttttggctttcagcagttttactatactgtgtctgtttgtggatctctttatgtttatcctgcttaaagtctgttgaagtgcttggacgtattgtttaaattttttcatcagatttggaaagttttcagccatgatttcttcaaatattctttctgctcctttatctcctctccttctgtgagatgatttttaaatgatctaaatgctttaaaaacctttaatggtctaactgggagtaaaatgtgcagaacactaggcccaccctgcctaggtcctgaagctgcccatggagcccccggggtctgaggagggcaacagtgaaagcaagcttaaagcattcactgccacgggagccaggggttggtcacttattacttggtcctttctcaccttaagagtaggatagaggtgtccagagctcagctcatcagactgatggggcctctcacatatccccagggcagtggaagggggattggacactggcaggaagactgggaaaccccaaaacagagggagaaggtgctagaagccaattctgaatgtcaacaaagggcagtccatccttgtggggtgaggctgtgcctaggccatggtctagtcatggtctagccatggtccggccaatgtcagcactgaaccaagaaggattaggactcaagagtgtctatcatttgcttcttgaaaaaacagctgctattgtcctcatgtagtgcaccagccatccggccccaaggtaataataatatcatacactatacaatagcaatagcttctaagcactgagtttaccactgggtttagcatattctatgtattagctcatttaatgctgtcaaaaattgtctcggtaggtactatagtgatcttcaattgccagatgataaaactgagacccagagaagtggagtgacttgcccaaggccacacagctagtgaatatcaaagctggaattggaactcaggtgctcctgattccagagcgcatgctttttcaatatcatcctgcatcacccttggcatccagactttgatctccactatcattctcagaaagtcagggttctttaaaaagatagatgactggaagtagagagggtcaaggacaatgtgggcagaggccatcccaagcctggtctggccaagttggtgtgcctggtagtttcaccacccagcctcagggtgtctgctgccccagtttagtcaggcaggtcaggagtgggttgggattgccagctctggtggcaacagaaaacccagtgactgcagggcggcatggttgatatctgctgggcctgcctgcagggtcgcctggtatctcgttttggcctctgcacgctgatgggtcaggactctgaaggcctgagcagcaatgtgttgctgtgagccagctgcacttgcctgtaggggtctgtggtgggggcctggcgcagtgccacatctgtgcccaggacacacagtctgtccaggacagagcaggactccagacatgttcccatcacccaaccattcctgagagtttcttgtgcaccaggcctgtgctggataaggcccttcccctgtcctcggtggtacagatagaaagagtattggccactctgggggaccagggctgtggtgaggtttactgtgcaggcccagctcagcctggagcttcgtgggaggcctcagagaggaggagcttggatttggagtggggaaggcttccaagcaagcgtgtaaataacaggaatatgctttccgggcactgtgagccctgggccacagcaggcgctcctgggggaggagtgggggtgtggctggaacaggtgatgaagggcttgtgtgacaggctgtgcaaacttggactttatctggaggccagggagaagggttttaggtgacatgctcagattggcattttgaaagatcctgctagtggcaggttggaggctgggctgaaggaggcaagaacgctaaggaagccagcccctgaacatggatagggactgatgactggacacaagacagcggtgagcagaagctgaaggggagggaatggattctggaatggaaaagtaccatctatgggccgtggtgcccagtgagagggaagagggagcaggcagcaaggagggctaccagatctttacggtggctgcctgggcaaatcagctgccaactgggatacaaatacacgtgcataaacaggtaggctcgccttccactctgcagttatttattgaacatctactgtgtgtcagacacatagcaagcattagaggacaccacaatgagcaaaacaggaaaggctccctctgtctaggagcttgtgttgcagttggtgaagtcaggcagtaagtacaaatcagtgggaactagggaactatcagatcagatgaagaacacagaagagtgctttcatagtgtgcactgggctgccttctcctggagtagcaggagttagtagttagtagcatgcatgcttaggcccatgatacttttagggtccacagatatgtttcttttcttttttttttttttttttcagacggagtctcgctctgttgcccaggctggagtgcagtggcgcgatctcagctcactgcaacctccactttttgggttcaagcgattctcctgcctcagcctccagagtagctgggattacaggtgcctgccaccacgcctgactgatttttgtatttttagtagagacggagttttaccatgttggccaggctggtttcaaactcttgacctcaagtgatccgcctgccttggcctcccaaaatgctggaattataggcgggagcaactgcacccggccacagatatgtttctatttgcctatttgtatttattttataaccagatgagaaaatgggtataatagtgaatatataattatgaactcagcctggagatttgtgtttacaccaatgcagtcagaaaatatatatatatatatatatatatatatagtatatatattttgtttgtttttgtttttttgagatggagtctcactctgtcacccaggctggagtccagtggcgccatttcagctcactgcaagctctacctcccaggttcaagctattctcctccctcagcctcccgagtagctgggattacaggcgcccgccactacgcctggctaatttttgaatttttagtagagacagagtttcaccatgttggctaggctggtctcaaactcctgacctcaagagatctgcctgcctcggactcccaaagtgctgggattacaggcatgagcctccatgcccagccagaaaataaaatttttaataaggttttatgcaaaaagggcccacaaaggcaaaagtgcctagggtccacagaagtcataatgaagccctgaagggtgtctggggcagctttcgattgggtggccactgtgggtctctcctatgataggacatgaaaacttcacgtactaccactccactaaagctcaggcagggggagggtccacatgcccacagtaaggatcctgatgttgacgtgggtgatatcttgttgaggtcaaaggatacagccttgaatttttaacccaaaggcaacttttcctaagctgtctctttgcccttcacggctgtcaggcccagccatgcccagcctgacagccacccttcaggcactgacctgggagcagaagctctctagaacccgtttccatcacttctgagacattgttagtggtactcattactcctttgagggaggtctgaggggtgttgtcacctgtgcctcttgtgtccagctaagaacagggcgccgcgagaggtctgggagggcctgagcccaggggaactgccattcctgagtcagcatgcccagggctgctaatgaaatccagatgttagacagaaaacaatcatcgcccccacccatctggcagctcgggtttcttggagattgcaaaagaagaaaaatagagccgagagagaatggaatcctagaacagctgagatcttagaggcaggatgtaaatagtctcagggtcttgctggggaaagggcaggagacaagggaaagagggggctggcccagtcctccttcttcctcacccaggtctctgcagccctcggaccccagcccctgcacccctccccaggccagagcaggctggtccttgaagggagtaggctgttggaggcagcaggcagggccgaggcccccagcccatgtctgacccttgcctacagtttccaacccctcattccaaccctgacctcactgcaggtctgggtgtcctctgggaccagagtggctagagcccagggaggggacaggccaaaaaggactgaggctaggcagaattgtgggctgactagaagcttctcctcagaaccccagagctgagtggcatagggatagaggatgaggggtatggtgggccagctgggggacctagcctcttcttcccaccagggtagcctcacacatatccacctcacatgttagggagcatgcgaagggaaggctctcaggcttataaagtttaacaccattgattagttcagacccatcaacatactggtggggaaactgaggttttctcacaacactggggctaaggactgcctgtcataaaaaaatgtatagaaggctgggtgcggtggctcatgcctgtaatcccagcactttgggaggacgaggtgagcagatcgcctgaggtcaggagtttgagaccagcccggccaacatgatgaaacctcatctctgctaaaaatacaaaaaaattagccaggtgtggtggcgcacacctataatcccagttacttgggaggctgaggcaggagaattgcttgaactcaggatgtggaggttgcagtgagccgagatcgcaccactgcactccagcctgggcaacaagagcgaaactccatttctaaaataaatgaataaataaatataaaaaatgcatacagggaggggcagaaaggtaacaccacagacaaaaagccctttgaatgttagacagtggaattagcaaagaaagtgttatactgccacccattactcattagcaaacatccagaaggaaggaagaaaggaagaaaggaaagaagggagggagggaggaagggagggagggggaagggagagggagaagagggaggacagacagcatcattctgtgttcccactgaggaaggactgggcctagggcagatggcatagcaggggatgggtgctgaaggtagcattgcagggggttctcctggagcctgggctggctggccaaggggcctcagctgaggttcttccagcacttggcacagaacctggaatgtcgtgagcactcagagaatgtcagctgggatgggtgttgctgggggtgtcgtgcctgccgtttggcaggtggtggcttggcatagatgctgacgttagggtagtgccccaaacccagtgtccgggcctcgaggctctcctccttgccctgccgaagccctctcctttcagtgaggtgccttcgagcacagccctgaagccagcctgcctgcgttccacccctggcgccgccttgtagcagcagtgctatgtgcctttgggaaaaattcattcagtctttctaggcctcagtttcctcctctgtaaaatgaagatattaaaacatcctacttcatgggatgttgtgagcttaaccgagttattttatctgaagtgtttataacagtgcctggcaccttgcttgcactgcaagtagtaactcttaggactgttaattactgtcattattattattattattattattttgagatagaaacttgctctgttgcccaggctgcagtgcagtggcatgatctcagctcactgcagcctccgcttcccgagttcaagcgattctcctgcctcctgagtagctggaactatagacatgaaccaccacactaggctaatttttgtatttttagtagagacagggtttctccatgttggccaggctggtctcaaactcctggcctcaagtgatctgcccgcctcggcctcccaaagtgctgggattacaggcgtgagccaccatgcccagcctactgtcgttattattatgcctcaattccgctgtttcaaactggcttgagaagtcccagggttctaagagactgcttcagcactgtggggatccacagaggtggctggagccctcccttcccaccctcattccctaagggaggggctgcctctgggaggggctgcagagaggccaggtgacaaggctgtgctttctcaggggtcttggggaggggacaggggaaggcccagatgactttgagtcccccaggttgtgctggggggactctgctgtgcccaggatgggtgctgtgggaggaggggcgatgcacagctggaaggtgcccagtgccgcctgtgggctgtcagttcccctatggcccagggaagaggaatctctctccaagtgcttgcctaggagcagctgctgggggtggagcaggggtgggggattggaggggtggggcatggagtgtgagggctcatggggagccacttttatatccttcctgctgcctcttgcctggcaggaaagagcctaggagggccagtttcacatcctcagctgccagttctgcttttagaagaattgcagatgataattaggagtccccaggaatctcgatgggtcaatggcctcaccttcccagccctctgcttctgagccttagggacagagatgttggcagagcctaggagccaggaccagtcctggtcttgaactacctgcaaggcctagtgaatggaatgctggagcacagcaagtgcatccttaagctgaatagctccaagtgtcacctcctttgggaagccctctctgatttctcctttcctccaagctcagagggactggcctcctctgaatgccagaaaggctcactcactcactcatttattcctcacctgccaagggcctccagtgtgccaggcccttggcctgcccctctcacatggctttcctttgtcttggagtaactcaagtgccctttgctgtgaagactccggggaaggttctggctgggacatcccttggtccctcaacctcagtaagaacaggagagccccaggcagcggagtctcactgagctggactcagagttcacttttgctctttcccagctgtgtgtccttcgccgtgttgcccaccttctcccaggcatctgtaaaatgggttcaccatccttgcagagtgtgtgtggaaagcgtctaatgcagggcttggcatcccacaagcactcagtaagtaagtggcagccctcactgttggtatcacttgttaggccgtggggcttcctgagccagatctgccctcatttgtaaagtgaggctcatgtacctgatgggagggttggtgtgagggagatgagaagcagcccggatacctgggaagcaacacccaccggagcccctctccttctccctgacccacccctgcagctgcttaatttcatgcatgcacgcagacacatatgtgcacacatgcaaacgtgcgtgcatgcacacaccccttgggcttctcagcctcaaggccttgctcacactgtccccgagtctgcaatgcctttcccgaatctcttctctcctatccccctttcagagcccagcttgagcccacctctctcagggagtcttccccaaccatccagggcctcagagctctcctctctgaaccctaacttgtcaggacagcaccccttccccagaacctggttttaaggccctcaagaggtaagaaatctcaaccaggtttctcatctttcccccatccccatctggcccctaggggacagagaatgcccctctttgggtgggcttcactctgccctgccccagtcctggaaggtagcccagcctgggccgtttgacctctgctcagccttctcatccccactccacctgtgctatggccttagccagtgactctctcatctcccccaggttcagcccaaacacgtcctcttgcatggtgcagcccctatgcccttctatgccccatgtgctcctgccttggtgagtcgtgcctagcccagggccggtcctggcacaagtctgtctcctacttcctgaggtcacttcccaggcgaggtctgtgtctgcctggcaggcagagggagcatggccttggggtcagaaggcccgagctctcatcccagggctgtctctctagctgttcaacattggccaagttgaccttacccttgggcccccacacccccatgcatgaagtggcatcagcaatgaagcctgtctctcagggcttctgtgagatccagaggcgatcagacaggtgaacgcgctttgagaactgtgaagttataccatttgctccactgcccagcgagcagccacatttgctgagatgatcagaggtgtgcgagcgagggtgtttaggccttggtggctgctgtgagctgacccctgcctcaactgccatggggtcttggaggcatatttgtgagggcagcattttccctttccaccatgtctggggtggctgcccagggtggagcctgtgttgggtgcctcctgctcccagtggctttgtgtggagtgggaggtggcccagctggggcaaggtggccagatcccagcctgtgggttagaggacttggcaccactgacctggcctgacttggagacatggctcctcaacacaccgcccccactccctcccattccaaggctcagggctcagagaaacggggcagcaggtgcagggaagaaatgtgcatggaatgggggtgaggagcccgaggacatcaggccttcctcatgcctggctcacggagcaccttcgtctcatttgctggctgggttcttacactcacctggatgtcatctgtggcccatgtgcccactcttcttctctttcttcatctctgtctctcatcctttcttcctcttttcttttgtaacagattacataacttgcccctggtcccacagctggttaggatcaggccaagtcagtctgaccttaggccgtgcctttcccactgctccctctgcccacaacaacggatgggggtccatcctctaggacatgctgtagacctgctgatctccagccctggcagaaatcaggctgcaggaggcactgtgaacccaggccttcctccctgcctggcttcctccaagttccctggctgtgtgggagccacaggtctctccctgacaggttggggtgatggtgaggtggaggggtgcccccaaagcagtaggcatgatgacaaggggtaaaacccaacaggggcccatgctcctctgctccttcctggggactgtgaagctcaaacagagccttgtgcccctccctcccgcaggccctctgagccctccccatgcatcagtcctccctctgtgttcccaaaacaccctgcacaaacggcttagtattttgtattctcttttgattgtgatcccggggagggggaaggctggcagaaaatcacttagcgcagcacctggcacatagtgagtgctcagcaagtgtgagccattgcgttgctgtggcttcagtgcgccatccacagtgtctgccgtggtgcccactctgagcagggccccgtcataagggaaacatattaacagcacagcagctacacgcacagggagcgctcactgtgttccgggcactgctctgagcacttttcacccattgactcctctaatcttctcatggcccttgtgctggacactcttcttatccccattgcacagaggaggaaactgaggcacagagaggctaagtgacttgccgagggtcacacagcttggacatgttccccagcagtcttgcttcagaggctgtgctgtcataaatatgtgcaaaaaaaggaagaaatgaacaagactcaggatgtggaggaggaaagaaaggcagggagctaatgttgactgagcatcctccatgtaccagcacatcactgatgtcttcagagacgtcaagggattcgcccagagtcacacaggagccaagggcatggctgggatttgagccctgggtgatttctaatcccctcctccccaccttatcccaccagctcaggcctcagagagccagcacagttcatcaagggccccctggacacccccagcagccttggaccacatagctgagttggaggcaagacaaggaattactcagtgaggccactcattaccaacgcgtttggttctaaccagccataggtgaggagtttagaggaaggagcagagccaagtgggcgaccttgaataagcccattgcccttgccacacctcaatttccccttctgtgcagtggacccagcaatatgcatcctgtccctctaggctgccgtgtaggtcttatgagctaacaaagctggaaatgacgaaagccaagctgaacaaaagttaagagctttgtaggaataaaaatacttttatttatgaacatctaaaggctttgcctaaaagtgtggtcagtggaccggcagcagtggcagtacctggagcttatcaaaaatgcgcagcccgggtcctcaggctccaccccagtcctgctgggtcagagtctgcattttcacaagcttcccccatcacccatgggaaacactggtctaggaatttcttgcttctcagttccccattcccggaggctgcctcttgggccttctttccatagcctacaaggggttcttggcaggaaattcccatctcgttggagaaaatgctgtggcccagccagacccctgccctgctcaactgcctaggagatatgagtgcatcagaattaagctgaagttgggcagaggctctaacagcctctgtcactccaacaacctctgatgagaccatttgttgggagtgcagctgccaccagaatcaacaaggcctttcagacctgggagagggtgcagggaggagtgagggggtaccctcagcctgggctcagtagggctaggggtttcttctgaacaaagggcatttgtaccagatattctccaccttcacccaggaaggcaaaaggttgaaaccgcagttggaatattccaggttagaaataagaagcaacgtcccaactgatcaggagcaagccagccaaggacactgaagactccatccccttaaatgtgtggccagtgtgtgtgaggtcaagaggcagagctggaacggattcccagaggccctctgcccaccgtcctgccctgagaccattttgacttcaaggggccaagggactcacctaaggtcacatagcaaggagccctgggttctgattccctgtgcctggggcccctcttcattgcaggccttcctggaggctggggagtgaccttgatgaccttagcaacctcccttgaagcagcctggaggttttgagcatgtcaatgggaggacgggaggggctggctttgtgagcctagcaactcagtgtgtctcactgtgtcttagccttcatggtacccaagatcattaggaataccccaggggcagaagtcctctgagacagatgcggtgagtcagggacaggaaacctggacccaaggggtccaggtagaggaagcaagtagaggcttgggaggcctgacattgatgaagagcctggggaccagtgctgtgtatccttaggccagttacttgcagtctctgtttccctatgtgtaatatggaggagaggttagacaagatcagtgattccatctcgggcttcacattagaaccacctgggttttttttggttttggtttggtttttggtgctagaaatttgaattcagtagatccagggtgggcctggccaagggcatattcctagctccccaggtaattctgacgtgcagctgggcaaaagcaccattgccaggtctgagatggtggggtgctctggcagctgtggtggctgcaggtgatcataaccacaattatcctcctgaggtcctgggaatgcaagattacaaggttccgggagactcccaaatgaacattccagaggttctagatatccagaggttccagatgttcaacctcagattccctaggtcatgtgactgcagctttattattctgagaagtgaagcttcccacaatggaggattctgacacttgagtgttctggttttgtgactttaagagtgtgagattctataatcattctgtatacctcaagtacgtgcttctgaaaccttccgtgtgtttctgtgttccaactgcagttattattcttctctaaaatgaagattctccatgtctgtaattccaacacattcattatcccaaattctagagactccaagaacttaagctattgtggcactaatattttttaaaattctaaattcagcaactctgtgacctgtcattccatctgggcagttggccgccaaggcttgggcccagactttgtctccttgagacaaggtggtgatcgtataagctgggacacgtgccccctcacctccttggcctggagagcctgtcttggtggaaggggtgagggtggggagaacagagaccccacggagctctcacttctttggctcttcctccaacactggctgtagaggactggaaggtggagcaagtgtgaggggcacatgtggccatgcggcaaggagggcagcaggtggacatacagctacatccccgaattgctgcttgtatccacccatctcacagcaaagctgtgaattctctgtgtcagactggcttagacattagaggctatcacatccgaagcacctccctaaactctctctctctctctctctctctcacacacacacacacacacatgcgcacgcacatataccctttttccacctaggaaaactaaggcccagaaggaggaggtgacatgcctgatagagctggcatccaaacccagggccctgaactcccggttgtcattgcatggtcctttccagctagtcaggcccaggtctggctttctgcacagaaccatcagctttctatagctgactttcaggtccctccaaggggacagggaccagcccggtgactcaggattacacatttaaagcctgtagcctggcggatttcactaggcccaggagaggctccccctgcccccgcatgacctcctggccgtttcctgcctgcctgaccacagtcttccgttccactcccccaggacgggtgcccgccttgtgccagtgcacatcaggctcagaggccaggaggcagaggctgggctggagtcaggcgtggggaggggtcccgccactcactcactgtgtgaccttgaaaaagtctctccacctctctgggcctctccatgctgtgggccggtggatggtaattgacagagttactgtgaggattaaatgagaccccaggggaaaacccagcatgctgggaggggaggggcagaggctggtcacatccaccgcccactggtcccctcagcactgaacccattttggatgagtggcttgtgtttgttgaaggtgtctgggtagacttccatataatccttcagagataaaatgatggattgcagactctcctgggctttcagaaggttggctggtagaggagatagagtccaaaggccttggacacctgagatttaggcagatgtccagaaaatggtgatgatgatgttgatggtggctattgttaactgaattccagccatgtgcttggtactcatgagctccttaaagcttctcgactgcctgcctgatcgatcttattatccctacttacacgggggaaaccaaggctcagagcatttcagaaacttgtcgaagctcttgccgccagtaatggctaagttgggattcaaacccaggtctccaggaccgcacagccagagctctgtttcacttcgtactcagctagaagaggggacgcagggccacatgatggatggtggccatctctctacgtggctgcaggcagtccacggccagggaaatagaaagacattttctagaagagatgctagtggttgcctgttttcctccctcggtgggattctcccaattttccatgtggctatttttatcacttttagaaatctggagctgcctgtggctgcccagtccctggagatgggtggaacacacagggctctgcacagccacccacaccatgtacgtacgcggggctgccaaggggcgagggtgtacacgggcatgtccgcccctcaccgatgcacctgtgcacactcgcacagaggctcatgccgctgcaggctgctgccaagtccaggggacccaagagcttagcaggaagctcctgagctacctcccttggggttctggagccatgggtctgccttggccactcacttccttgtcagttgacttaaaacggagttggcaggtcatgccacggtgcgttccgctcgctccctgtgtgcatgcatgcgtgtgtgcatgtgcagctgcagacctgtgcacacccaggcccagttcagggcacaggctcaatgccccctgtggaggcgtagcaggaagtccttgctccagggcttctaaaagccaagactccccacgtggttcctcccactcgcgagattctggccttctgggcttctgggagccagggaagggcaggagagacagccagggctctgtaaggggcacatgtggggtgctccagggactggggacggtggacttgctgggggtcctgccctggcagagcaggtctctggggctgagaaaccttctcagagtgggatggcagggtcctggggctgagcatggcacctccaggaggggccgaggcctcctggaggtctcctgacccttcttctgtcctcacagttgcttcagactctccctagcactggcctgggatcccaggaggcctgagcttggccctgcctctcacaggctgtgtgggctggagtcccctggccttggcctcctcctctggaaagtggggcacccgtgggcagtggaatgagactttggcagtcctgctctgtgcatatactgggcacactgagccctgggaggctggggccacctttccctctagaatctggttccatcctctccctcctgggttttcttccgctgcagactcaacaccccttccgttgagtcctccttcatggctctgaagaattgttttggggcccagcaggcaacttggaacagtggggaaagccctggcctgccaccgtggcctgtgttcacatggttcctgctctgagcctatttgctcacctgcaggggagtgtgtgtgtgtttaattatagcaccatgccaggatgcctggccacattagactgtaaatctaaagacagaggtcaaggcctctttttaccagccccgaggtgattttcaaatcagctttagggtggatcatacccccaagggcaccttgagcaggctcacatgacaggtttataggcgattcctgaggacaggagccagggcaaacagttatcatgaggctgccatccatcactgttgcctgctgtccagtgacggccagtcctccttccgtccatcactgccggcacaagacaccgtcatcaccttcccttgctccaccctggccttgtcccccagtcagagccagggcaaccatgggccaagaggggagctcctgcctcagcccccacagccccgcagctgattgaggccacacacctgggagttgctcttgagtccttgctctcctcccccaaggctagcccaagtgctgctgactcaacctcctgccatctcaggggtctctcactcttctcccctctgccacccatccccagaccacacccccaccacctctccccagcaatgtggcagcacccccctaactggtccccccatgtccaacccctctgtccactcagcagccaaagagatctcacaatgccaggcagactttcgcattttcagcgcttccctggcttcccatactcctgggctgatatttaactctaagatatggtctaggacctggactggcctggcctccaagcctcaagccctccatgcttcccgtggtctagccctttgcacaggctgctccagccccacagggccctttccactgtgacgtcactcctccccagccatgctggccagatgctcccagaacatggggctctgctcatcctgagcacatcccagaaggccagatcagtgttcaagcatgctacttttgtctgactggtcatcgtgtatttattgagtacctactatgtgccaggtgctgctccaggcatgggacattccatagtgaacaagaaagatgaggaaagaatgcagttcccaatcttgcaggatgacaaatagtaaagaaattgacaccaatggatatgctatggtggcaggtcatattcaaagacagttgtcagggatggtgtctctgaggacatgacaacttgagtagagacaaatgaagcaggagcaaatggtgtgggcatctgggggaagggtattcctggcagagggaacagcaagtgcagaggctctgagtgaggcacagatgtgcttggcttgtttgaggaagagcaagagggccagaatgggcctcctgacagctccagctcagagggagagttggctgggaggggaggggcggaggcacagggttgaacgcatcccctgccttgctctcccttctcccgcctcctcccccagctgggcagctcttctctgggggacacagatgggtgcttgtcttgagagcccccgtcctccccctgctcctccaaacactcgcagtggggacaggaagtgtcggccctcgccttccagctgcccgggtgggacaccactgagctgggctggcctgctcagggagggacagaggccctattgagcccgttccctggaccatcagggacaatagccacactgaggaccaggaacagcgaccagcatgcttgcccaggaagttgccaggccgctgcctgccccatccccacacctcccctacccctctggctttctcttccagatacttctctcaggctgatagtcatgtccaaatggtcacttgcccttcacctgctccccagagccccctgtcctgtgccagacccacgctgggcccagggaatcagaggggacccctacagggtctctgtccctgaggagagggcagggaaggaggtgacagacacatgagctgagaggggtgtatcctaagtgcttcctacagagatccacaaggtacagggggtccctggagggcaggggagatgtctgctagaagtgctggtaggaaaggctccctggaggaagagtcacagttctaaagagcttccgcagccagggttgtgctttgaaagcccagcacccaagtggcccaagcctggcaaaaactagcctctgttacatgcccagaggtgtgcagaagcagtggccaggacttggactctgtccacttctcaagcctgtgtgctgtctactcatggaactatttgcattggaaggatctttagggatcatctaggtcaggaatgccaactcaagtcatgtgtgcctgctgcccccggccatggcagggcaggcaccacgaaaatcacaccattcttgcctgtcgagcttggatatagctgcagaatccttcacaccacagtagttttgtggcaagttacgagtggacacacagggagaagtatttgcctttcctgattttactttatccccccatcatggacagatggggaaactgagacccaggcagggaaggggcttatcccaggtcacagagcttgctggtggcagtgtgtagggactgggtcagggacaggaaggaggtcagaaacacccaccttttgcagtttaggctgtgaaccgtcagagactgggaatgggaatggttgactgccctgaacagaccttctgtatggcttctcactgtgaagaggggatccccattctcctctgccacgacaccccattccttcatatctctcatcacagctttaatgatctgaatgggatacttacttttcttccgcgcctggctgtaagttcatgggggccggggttgcatctgtcttgttaaccaccctcctccagtgccttgtgggtgcctaattcatagttgtcgagggcacatgtggaaaggaagtaaatgcacgtggtgattggtgctccaaagccttccctgctccctggctggttgtttggcctgcagacaacaagcgggatccctgggggcacctgggatccaggcatcaagctggtcagatacatgccagtatatagtaagcagctggcctaacctgggtagtccctgagctccctgcagggaaactgaggcccagagtgctataatcataagccaggagtcgtgcaggcagagcagggagctaagctggggtcaactggcttccgtccaggcttctgggcacccaatcttgccaccagcctccacatctgtagctcaggggctgacttttcccaacagctgggcccactgggagctgtgtgtgttggtgccaaggcaaacatcggtggtggaggtgggggcaggaggtgcctgcaggctctgtgttcctttgccttcctgaacagacagggctggagcccctgagcagcccggcctcctgctccatgatcattgttcccggtgatggtttccagatgctgaggagtcacaggtttggggctgggccaggagagccaggccagccctccccagtaccccgccgccactgacaccaccgccggtcttgcttttaaagagatgggcctttctcccccaatccaggctttcccctctcaagcccagcagcctcactgtcctgcaaccagcccagctcctggggtgaggagccctgcgctccactcccagctctgaccctaacttcctgtatggcttgagcaagtcacttgccttctctgtgcctcagtttcctgggctgtagaatgggcagatggggacagcatggaggtgacagtatctgactggactttaacagactgtgaccaggatcactggggcggtggctccctaggtgggtccccagaccagcagcagctgcaccgcccaggcatttgagactctggttctcaggccctccccagacctattgattctgagactctggggccagggcagcagcgtgcagtgtaccaatgccccgatggtcctgtgcgtgctctcgtgagcgaagaagagcgtgtgctctagaagcaggggctcaggaatctggaatcagaaagacgagcacagccgtatggcttcagaatgagccttcacttcctgctggggaatgtggactggcgctcccagccctgtgtgtggcatggttactgtgcaacagtcagcctggctcccacaccaccgagtgctcctctgggacaggcgctccctgggggcaggtctgcacctggctggcgctccaccccatcagcactttaaaggcgctgtctcagaccctagcaaagaggccatgtgtgcacacaggttgcggggcgtgtgtccagcttgccttcagcaggtgtagagggggccctagggtggcactgtggcacagagagtgacaagaggagccctggggcaaggggacagagaccagaagggtcaaggaggcttcccggaggaagtgcagcttccactggatttggttgggaggcagggtgtgccaggtagtgagactggggtgtgtaaaggtgggtatgaaaacaagtaccaccagccagccccttctccttctcctcccttttcagggcaccagcgggattattgtcctgtggggctgtccacagacaagggcaaggaggtcagagctcaaggccatgtaggaggcatgcggcgttgcagcagtcagtcaggcctgggttcagatcccagctctgctgtttcctgcctgtgtgacctcaggcaaatctcttaacctctctgtgacttggattcctcatctgtaggggttacagggaggatgaaatggctggtggaggtaaccccacacatagcaggagctgtgagggttttagagccagggaacctggggcccaggcaggggaagtgaccatttggggacactccatcatcctgcttcctgcagagcttcctgcacagaacaccctcgcctttggggacagtggagaaaggtcagtttgggaatgtctttccagccccttggtgaagaagcagggtcagcaggggtgggaaatgtgaggcttccttcctccctgcgacccccctgtaaaagtcacataagagcagctcttcctctgcagagctcccctccacccaattgaagaacaggtgccacaggtgtcctttgtacctgtccatggccttctggacctccgatatctcgctcagcaaggagggaattgggcaacagggagaaaggccatggttcgaagccttctgcttatttgctttgtgaccttggacaggtgacttaacctctctgagcctctatttcctcacctggaaatgggatcacaatgaagctacctacaggttgtgtgcgtggccagccccagcacgcaggggagactcagcactctccaccccggtctgtggttgccacagtctcctaagtgctgtgagctccagcgctcacccagagatggaaagtttgcttctctttctacccagatgaggagatcgaatcccagagagaggaggtgatttatgtgagggttttgcgaggctggaagtcacgcccacagcctcttgccaggcagcagtgggggcctcagcccccaggcctctgccagagtggccccaaactgctgacttcagcatttcactggccagggcagatcagatttcttttctggcacttggccaccctgcacacccttcccccatcactattttgagctgagctcccctgtcccctcctcccagggctgtggccctcacacccaaagcctcactccaggctgaggcctttccacctcttgacccaccaccttccctccagccagggaaggctgggctggtcacggccatgtctatccaggccttgccagggacgccttcagacacagagccaggggccagctgccctgtgcaaatggcgctgctagctcaagacagccgtccagggtgctcagcactgcccaaggaggcgtcctgggactggacagagcccacgccatgatcagccctggcattgccacctcctacctgtgcgacctccaccctgccctaacttctgctgtccacctcacacctcaccctttgcaggcactgccactcctggtgtcccctccagctgccaaaggattctgagccccagcctgagcctagtgctaccatagaagtgagaggtgtggagggtgcacctgaccgcagcacacagagaggcttgtgggaaacaagatggcagtaggggaatttcgtttaaatttcgggtgaaatctctgagtttggcaagctggaggttgggtcagggcaggacatgacctagggaagatcatgtctctcgcctttcctggagctaagcgtgtggtgcaaaccacagagtcccctggaagttcagggagagggccttctccagggcaaggcggcgggtgggttcttatctccacaccagccagcctgggactcagcagtggagtgagctcctgagcagtgcattagccctctctgggccagggagaccagggtgcccctggagcttgctcttgaagggtacatggctgttcactggtgaagtgttgggtacagggaacagcaagaaaaaggcacagatgggcagcatgtcacttgcagggagtgacttttctttatttgagtgtaagtgctgtgggtggaaggtcagctggggccagaaggggaaggggcccgaatgccttgcatgtttcatctcagctctgcggtgaggcccaaacctgaagtgggccttcatttaagtatttggggagattctgcctggcccaactcaggcggtgactgcagcaggagagagaggtgcagtcggaagaaaggtcttgctgagcaaacgggacccaaagagggatgtgcaagatctggaaacaacaaatggttttcaaactcaatagtcccctccagcaatcagcaaacagcagggtggctgcagatcttccatccacccactaaggcagccagcaatccctgtctctgcagtggcggaggaaacctctgtcttttgcaatccctgtgattcggaagctttccacccctctggaccggcccctcttcccctcccgcccctccgctctgatccgtgtggtttgctaagggaggaaagccagagcaggaaacagataacttagggagtggctgttcatgtgattaaaatgtctttgctttccaaaaagttttgcctgagattacttcaaatcgcctggctggggtgggatttggagagggggcttcttgctgccttctgggcagcagcgcctcagggccgggcacagggctggaggcacggggtgttggggggcttggcacttctctgggtcctggaggggctccttggcctctgtgggccccgttcccccgaatgtctctgtctcccagcccttttggtttgtttctgcatcatgtctcgcctctcctgggcaccctgtccccccttctcctcttatctgctctgacgggcgctctctcactccctgcccctcattcccaacatcgtgtcctcactccctgtctctccaggatctctccctcatctctctgtcccccgcttgttttctcctctctatctcccttccctcctctccacacccccactccatgcccccctccccagggttttcctgaggccttttcctgtccctgtgaaagctcccattgttccttgcactttgacaaaccctagtgttgtggaatcaggatggcatttttgtggtggctttgggctgggaacgggggtgggaggggtgacaagaggccaggccttctgggcccatgctgggctgcagcaggaacccagaagaggggagggggccctgggcaaggaggcgaggacggctgtgcgcagacaaggaggcccttgaggctccagaggaagccccgggtggcctcttgccgcgtccttcctccctcccagcatcctgcaggccgcggcccagcccacctgtccctctgaccgcctgcttcctccggggcctccgtggagcctgcagctgcccagaccaggctgcagggacgcagcccttccacctgcctcccccggccgtgcatgtggacatgtgagtgtggaggtctttggttggtccctaaagcagtaccacagagcacagaggggaaggaaaagccaggggctcagcacttggcagacttgctgcccctgtctcgagcctcagtttcctcatccgtcattagggttaagagtgctgattcaatgaggccgtggcagtgatcagagataatttcatgtggcatgcataggtcccatgcctgtcacttgggaggtctgtctggcctctgcctgagggcgtgaatccaagtgtgttttcacaggtgtgagtccgacttgggcttgagcccaggagtatgtggctaggggagttcgcgactggtgtgggtcacggttggggaaagggtcacagggctgacttctttggaaggccttggactgagagctccatgaagacagggcattcttcatctgtcttgtttccatatttctggaattttccacagagcctggtgcagagtgggtgctcagtgtaaattaggtgaacaaatgaatattgaggtggtggccagggtcggaggtaagaggtgcggctgtgttcctaggagcaggctttttctttaattttctctcaaccgtctcacggagaggccgcacattcagtggaaagtgtcgttttggagtcagcaaattgggtttaagttctggctccatggctgtgtggccttgagcaggttgcttggcctctctgtacctcagtttgctctcctgttaaatgaaagagctctggagagccaggtcagaaagcgtgtggcacattgtaggtgctcattgaatgctagtgtctccagctccaccagagcagccccctcacatggaagatagaaaaaccaaggctctggccgggcacagtggctcacgcctataatccccacactttgggaggccgaggcgggcgtatcacaaggtcaggagatcgaaaccatcctggctaacacagtgaaaccccgtctctactaaaaatacaaaaaattagccgggcgtggtggcgggcacctatagtcccagctacttgggaggccaaggcaggagaatggcatggaactgggaggtggagcttgcagtgagcggagatcacgccactgcactccagcctgggtgacagagcgagactccgtctcaaaaaaaagaaaaaagaaaaaaaaagaaaaaccaagtatctaagacaggcgtgggagagccagggcccaacctggacctctgacctctatcccctgtttactccgcactgccccaggctcaaggagagacactagggagaatgaccagggaccttctgcctcctctggtaaaggcctccagaaagggccagcaaggccacacagaggatcctgggctggggtcgtgagtccgtggtcagccctgcgccccctctgtggactagttgccccacccctgtggcctctgtttctacatcagtggaaagtctttctcgaactcctgagaccggggctcttgctctctgggaaggtagactggagcccagggccacctcagcggccgggctgcaggaaagcacgcagactgggcagaccgggcaggacaggggccagcaggcagcccatctgttctttatttcctccccctgctcctcttggctccagccagagcctctcagctggacgcacggtggggtcggccttgtgctccatgggagggcggagcgtgagtgggctgccaggcacatgctgagttatgggcctcctgggaggccagtgaccctgcccagcagtcagtccaacctctcattctggagatgggaaaactgaggcccagagatggggagggatgcccccagcatgccaggacccatgagaacagcggccccttcccgtttctcaccatcccggcttggtgggtctcttctttgtgcaatcctggcatgttgtgtagcaatttagaaagtgagcccacgttaggtggcttgggctcggatctggactaccccatttcctggcagcgtagcttgggcaagccatgtaacctctacatgcgtcagcgttcccatctgaaacctgggactaaccgtacttagctcatggatggttgtcgggacacaaagagtgcctggccctgaccaaaaatacccaatgttggagcaacagtgatttctccatcccagggtttggcagggcacaggcctgcgcccctgtgcagatgggagtggcaaggccaggtctgggggtgaggcacatacctcaggctgggaggtatcgaggcctatagctggaacccatatccagagggcagaggccgtgcatcctggggcacagtgcagcctggagtcttggcgtgcagggcacagcctcaggctctcagtgcccaccctgctctcctcctggtccctatgattctctgcctcaacaaccaaaggccacaatgtcacctctgtgcaaaagggactcattgtctaaaagggatggggagatcaagcttcaccctaaaggatcactcactcgtggtgggacttcaagcacctggaggggagtgaccagtcaggctgtggtgtcacgtgacagtgtgtggacatgtctggcttcccttaaaatggaaggagcagaagggacccaggggtggggagtgcattccacagttggggggctagctctatggacatgagtatgatccaacagaaccagcagcctgaagccagccagtgcccaggccccagggtccacacctgcaggggcaggagtgtggccacagccaccatctctgtggggtttctgtcaccttgggaaagcacagtgcgccccctagggggcaggaggggcctgcaggccagggagtgggctggctaccatcttcttccaagccatacccactcattaaaggcaattcattcattaagacagagcataagctgcagaagtaagatcatcaacagtcctgtctctcagcccttgtggctgctttcctgccagtcctgttcttgtgcagcggttatcttcggttgcttatcctgctctctttataagtattttcccaaaccccgaacaaaaatcaccataactattttagtggctttattgtcattcatccaaagggtataacgtaatttagggaacccgggcattgttgttgaatgtttcgctcattccagatttacattgtcctaactcatgctgtaatggacatttttgaacaccccttttgtccgcatgtctgataatttccttgggatagtcgcccagagatggatttgcttaggataaggaatgcacatttttttaaagtttgaaggcttacagaagtttgaagttgtcctatagaaatacagtaggaaaatatacctgttcagcccccaccccagcagcatctcagagtgcctgtctccacacctgcctggttggcctttaccagctgcaggggttgggaggactgtagagttggaagtgcctccagagtcaccagatccacctgcctgaccagggcaaaggccccctcagcagcctccctgatacttgttctctcagcctctgcttgcatacccccagtaaaaggcagctcaccacctcccagccaacctcaagagatttcacgcagggatgggaagaaaacactgaaccattctgaagaagtgcccagagagtgtgagcctcctccacatctcttccgaagccgctggcttgcccggggggcccctcccacttccccgccctgcagcgctgccttctctgctccttggcttggctcctccttcccacccccatactggccacagcttcccacttcccaggctgccctcgtgtgaggatcccagcctcactctggaagtcagaggatccttccctcccccgagctcagtcagatttactgagtgtgtccttgagtgagtccccttgcctctctggtccccaaagggcctgtctgtgctacaaggagtggtttctgagctccagtgagctttgcccaggctcctggcagatgtgatcccccagaggggtacgtggcaggggcctgggtcaggagagcctggtcaggcctggcttccttcccagccgggcgggtggtggcccctgcagtgctgtcagcagttaccgtctgtttcatgctgaagtttatgagaagaggccgtgcctttctgggaggaggcaggggggtgtgtggtgagtagagaagcctttgttccgttagaaattccttctccccttggccctgccctcatttgtaagcataaacaacgtcgggactgaacccttccaggaaatggctccttgctgctaagagctgcccacagtccttcttctcctccatccactgcctttacccctgccctgtaggccacctctaccgaggtcaccgccaaggcctgacactggactgggctgaggggaggccctaggaattttcttataaaattcctgctagggggtctctccccaccaacacaagcctccatcatggtgggggcaattttgggggtggcagacagaagaggtgggtcaagtgtggccttgtggaagagcctgctgagcctagcctgctgcccttcacgcactggaagcactttggcaagtcccaccccttccctgtgcctcagtttcaccatctgttaataggttgataatgtcccctgccccacaggattccaggagagttggctgggggtctgacgggctgtggagtcctaagcataaagcccagcacacaggtggtgccacacaaatgccagttctctttcctctttcctcaacctctgccagcagtgtccccagagcttctgcagcgtggtccttccatgagaattctagaaagcgaagatgcctaatgctgtttcttcttttgcttgccagtccattcctacccagggatagagagctacccagatatccctcccaggtttccctcccatctctggaaccatcctcctgggactaatgcctgtggacctcagccctagcctcggcaatacctcagacacctctgctccctctcctagtgcaggcaacgaagaagagaatcaccctgaaatagctaatggtgaccgagcacttgcagtgtgccaaccactgagctgagacctttacacgcatgaatgtgtcaaatcccaacagccccgggaggcaggtcctttatcatcatcctggtttccagatgaggaaaccaaggcacagagagtttgaataacttggcgaggaactccctggatagtcacaggcagagccagatgtcattgcaggcatctggccctggagaccacaattggagccacatcccatgcaatggcgtgttggagccgggccctcccagtgcctggcctgacagcagccgtgggaatggtgcgctgaggacgtctggtcctgcaggaggctggggccccatcccttgcctgccaagcagcccacacgccctgacggacggctccagacggctgcttttctaattacatggtgcgtctgtgcttcctggctcacccctcgctcttctctttcatcttcctgttcccttcggttctcactcagtgtcttctttatctgtgtgggttttcttcccgttcatttctgaagcaggggctctgggaacaaattcccagagtccacctccagtctggccccagtccccacgcttcactctgcccagtgtcctggaatgacttgacccctccttctggtaccttgacccctgtcctttgccccaactgtgtgaggccaggcaccaggtcctgtgagctctctgagctcagaggcctgcagaaccagatccagagtgggcctggctggtgagagtccccaagttcccaccttcgatcaaggagtctcagacctcagcatcagggaggcacccatgcctgccccctcatcccctctgaagacgtagatgcttctggggagacatgggggagtgagttcatccagtgctttatttcagataatggaagatgaggggttgtgatagagggggtggcttagaagtcacaggttccagaccccaggtgaaggagaaggtagcaccagaaacagtcagagggacatgcactaacttgagatcaacagagctcagtgtgccttcagaggcacacgttgacccctctattacaaactgactggccccgggccctagctgcccactgagcactcccctgggtgtggctgacccctttctcagatctgaccagtgctgagggcagccctgccctggagctcaggctgaaccttctcccaagaatgttacagctgccaggaaggccactgaggatccaaagacgttaggcagtgggcccaggagatcagggtggtgttggtgtcactttctaactttagatctgcgcactcagcacgtatgtcccctcttaatgttttgtctgaaattctagcaggctatcaccaagtggtagtaatggcgcctgggacaaagaggcatgattactaaaggaagaaactatgtaccaattttatataccactttttgttctacattaataaataacaatggcattaatattcctgttttgtcttctgtgtgccaggcactgttctaaatgttttgcatttactcctcagctcatttaatcctcagaacagtcttatatggtagttactatccttatccttgtgaagtaacttgcccaagatcacagagctgggatctggatccagagcgtgtgcccttaaccattatgcaccacttcataaatgggcagttccccaaggaaagttactatggcaacatcatctcatagcccagcacttctttaacgtaatggcatatgaattctctggggctcttgttaaaatgcagttctgattctgcagatccaaggtggggctccagactctacatttctaacaagctggtggtgctgtcgctgttggtccggggaccacactttgaataaccactgtggagagcctgcatttaagcctctccaactcaaagcctgcgagggcctagtagagaacgtaaattcagctctagttggtgggagcagaggtgatgtggaggaagcacgtgcatgcaagctgatggggcagccactccttaacctcaaccagcaaggattctagaccagtgtggtcgtatttctgtgtgaaatctcccatttgcaaatattagggtaactcattcaacttttaagaacacttgcagcttgcacgtgaatgttcataatagcattattcataatagtcaaacattagaaacagccccagtgtctatcatctaataaatggggtaataaagcatggcatatccatacagtggaatattatttggcaacagaaaggattgaagtgctgacatatgctgtagcatgaacaaaccttgaaaacatgacactaagtgaagccagacacaaaaggacaaatgttgtatgtttctacttatattaaatacctagaatggggaaatccggacagacagaaagtacactagtggctgcctagggctgtgtgggataaggaagtgggagtaggatggggaaggactattactgggtatagggctacttttggggggtcaataaaaatattctaaaattagattgtggtgatgactgtatactctgtgaatttacttaaaaccaattgatttgtccactttaaatgggtaaactgtaagatacatgaattatatcagcaaagctgttaaaataacactgtgtgggagatagctagtttctttcatatataaaatgcagttacaaatcaacaagaaaaatattaggctattcctgcatgaaaaaagaatcacaaaaagtatgaacaattagttcacaaaggaaacacaagtgagtcttaaatgcatggcaaattcactcttgctcataataaaagacatacaagtcaaagctcctctgagaagattttctaccttttagattggtgataatgaaaactctgttgatgctgatatggaatgttaagttgggatacctgcagtatgtgggaagaaggggcagtggcaatttgctctttaaaaattagtggtgctcatacccattgacccaacaatttcacttctatattcacaaatacactcacacatgtgcaaaatgatacatatatgaagttattcattatagcattgtttgtaataatgggagaacagaaacaagctagatgttctaaaatagtaactggtcaatgcactacggagcttgcatggacttatattgtgtgcacctgttaaacagaatgcagtagctctatttgtagttatgtagggaaaactctaagatgtattattcagtaaaaaaaaacagtagccaggcacagctgtatgcacctacgtagccccagctactcaggtggctgaggcaggaggatcccttgagcccaggagtttgagtccagcctggccaatatatcgagaccctgtctcgaaaaaataaaataagataaatctttagaatggaagatgcagaaccaggaagatgcagaaccagatggataatctgtttccattttcatgagggaaaagaatgtatgtacaaatgtgcatgtcatatgcatctgtaaatgcagggcccgcctttggagtggtgtgagggaatttagattgcctcctagtaggggagctgactgggtgcagggaggaggaagactcattggcactgccaccagtttccgtgcttgtattgcctcttcaatgaccctttaaagcacactgctgggtaggccaaagagtgcctgtgtgcaggcccatgagaccagctgcccttgatgacgtgtgagttaaggaagtaatttccagccaccattgagtactttaccccttaaatctagaagagacgtgcgccatctcctctgttttttcaccatctcctctgttttctgttccctatgtgcctcccagccttcggattcccgtctgtgctctggggatgaccctggtattatctagactggggacaaaaggtgcctgcacacatggacacaggacatgaagactgaggcggaggccaggggaaccctgtggggcatcatcttggcctttggactccaatcccctgtgtttgcttcctgccctgtaggcacgccccaaaggcgagggcctgactccataccagggcaaaaagcgctgcttcggcgagtacaagtgtcccaagtgcaagagaaaatggatgagcgggaactcctgggccaacatggggcaggagtgcatcaagtgccacatcaacgtgtatccacacaagcaggtgagccgggcaggctggggccttctcagaaggaccgcgggagggcaacttttcccttaccggacctcagtttactccctcctacaagggagatctctctaagttgaccctttctttccttgtctcatctgaaatgggagggaagggaagggaaggaggatgatggggcaactgcaccaagatcttgagaccagagaaccccggggaattgtaaaactagtgaacagggtgtgctgttgtgagacagagatgtgcggacagcaggaagcagcagaaaactcaaatttccttccttgatccatccagtcggccagtgtcaacagggtggctgtgtgcaccaggcccgggcatgtgggaggggtagggccagctcctcctaggaaggtcttacctcaggcagctgcacagggaaagccactcagaggagctgatgctgacttggggacctggaggatggggggaagctaggcctatcacaagtggggggctggccatcctaggaagggggcacagcaggtgcaaatgccctgaggctgtaaggacttggggtgcttcaggcccacggttcagtgaaagcgcaggagagggcagcaagaggcttggggtagagggctagatggggcagtcacagagccctgggggcactcgagggacccaagagcagcagggctttcagattcattttaagtcagttactctggttgtgtgcagagattgagtgtggaaaccagtgggaaagccaatagcatagcctcatgtgagctgggaggggactgaactctggaggtggctctggagctggatgtgacaccaagcatcaccagattggtggtggaatgtgggggaagaacaggagcctaggagaacagtcccaccccaggcaggctggagcacctgaatggatagaggaggtcgttcctgaactgggcagcctgggcaggacacagatgttggaaatgaaaccaggggtcctctgatacaggttacatttgagatgtttgcaaaaatccagttagagatgtcaagaaggcagttagatctgtaattctgaagctcatgtgagaagtcaagatggcccaaatgtaagtgggtgtcatcaacctaaacgtagtagggaatggatttgagttcctgcagaaagaatgtagacagagtagagaagggattccctagaccaagtgatgctgaatcccagtgtttgatggtcagatagaggaggaagacccagtaaggagaaggagaaccagggggtgtggagtcctagaagcctggggtggggtcgggagagtgctgttggaggcttggctggtggttggtgctcaaatgtcaggtatagagaccacagaggagtgccttagaaatctggcaataaggcgatggtcctcaaattttacaaagcaaaacaaaagcattacttttacatggggaacttgaactacaaccaaggtttgagaagcacagaagcccggccagtcaggcatgagggtgagagtggaggtgctgatttgtagctggcctgaaagtcaaggcagtgtccatggagcagtgttaggggaggctggtgtggatctggctgcagagggaattgcctcattgtccactctcttgaggagagtttgattgttgagagaatcacagcagtggccgcaactgggaaggagcccttgggctgggtgttgtggagatagtagagcttggagcccagtgcagtctggtgagaatgatctagaagacagcaaagggctgatggtgcaggggcaaaacgggggatgcttcacccatcggcacaggagggagggagaagagggggtaattaggaagtttcatgggttggatggtgcaaagaagaacctcacatccaaggcttctgttttctcagtgaatgggagacaagcgggctggggcgggcttgaggaaggatgagcaaggaagcagcctgctagggaaagctggctggaccacccagccgcatcccaggcccagggaggtgtgcaatcctaatgcagtggcaggcatcagcctagttccgtgacttgctccagcacagctcgcctggcaggtgcaggccaggcctggtgtacggagggtccacggggcaaaggttggctgggcgagcactccagagggcagatggttggggggtgggcctatttgtaaaagtatgatgaccgtgcttcatcgtggggcatcggcagggaagggaagctagacgggaccggtggagagggaggccgggtgggcctgtggactgggtggagtctgggagccagtggaatggaaggagagaacgagggggcagagatgggtggtttctgaagaagcccaagtctagggtgtggctgaggggtggtaggagggaaaggtcactgtcgatgaggtagtgggggatggaggagccaggggtgggatgggccatccatgtgtactgagtcaccgcaaaggacaagcagacagaggaggcaggaggggagagcgctccgggagctactgggggaaggctaccctgagggagagatgtaagacagctctgatggggtagaaggtcagtagaccgggggcccggaggatagcttggagcctggaagggcagataagtggcctgggagggagcaggggaggagggaaggcagataatggtggctggctgggggcaggagtcaggaacagcccagtttctgcagggcctcagatgtatgggggctgctggggtctgtgctgacagtcctgggggctgggtccttacgacccccactgtgacttaagcagagagacagggcccagcctgtgcaccaaagccccacaggaacccagtctccgcagtggctccagccctcagcccctgccccgatactgccccagcttctggctgggcagggctcctcaccatgccccttccacaatgccaggcccattcctggcttgtgtcaccatccccaagctggcaacggccccacctgcctcgccatctccatcctgccaagctcagtcccagcacagctccctgaccacctgtcccccatctccacattcaggatcagctctcccaggacccaatctaaaggatccctcaagagtgtgtggctgggcccttcccctcttccagtcattaggccactgttgagcacctactgtgtgcactggggacactgaggccccaaaaggagacaggacttgagtagtcaagtgaccagtgaccagtcagctggtgtcaaggggccctggaactcaggtctcccaccgcccagggctctatctcctctcctgagctcccaagctgggagggggtatgagagtggtgcctctctatcccccagctgtcgggagcctttgaagagcccagcggcggtgctccccatgttgccccgcggtggagagggctggtttatttctcctgccccacagagccctgacctgtgtggcctccgtctctggagaaccccccacttccccactctcctggccgccacatctgcttcctgtcggcctccagctgcagctccccctaccgactccggtcccctcaagaagaaaacaccactgggccttgccttgctgcagggagtgggggaggccctccaccacagtcagccccagctgcagagtgttttccgtctgccgaggggaatgtcttgacagcttccccaggctcctcgcccagtggcaggccaagcagggctgagcagtcgagccagagcccgtgcccacagagggaactcccaccatggggtcatggccaaggagggggcacagctcagatgagcccaggagggtgctggcaaggatgtttcaagatcatttcacccgggacttcgctgtttcccctgcccccatgctgcccctaaccctatataacacatgataccaatactggccaacattttgaatgctctctatgtgccaggcactgttctaatccctttgcatagactaatttactcttcacagcaaccctatcatgtagagttagcctacagacttagcccccattttatggaggagaaaattgagtcccagagaagttaagtgatttgctaaaggtcacacagcaatcactaagtcttctggagctttttatggttataaaatactttaagacaatcatcgcagctgggcacagtggctcatacctgtagtcccagcactttgggaggccaaggtgggaggattgcttgagcccaggagttcaagatgagcctggtcaatatagtgagacctcgtctctataaaaaaattttttttaaacaattagccaggtatggtggtgcatgcctgtggtcccagctacttggaaggctaaggtgggaggattcactgcactccagcctatgtgagagtgaccctgtctctaaaaaagacagtcagccaggcgcagtggctgatgcctgtaatcccaatactttgggaggccaaagtgggtggatcacttgaggtcaggagctcaagaccagcctggccaacacagcgaaaccccgtctctactaaaactacaaaaattagatggatggtggtgtgtgcacctgtaatcccagctacttgggaggctgaggcaggagaatcactcgaacccaggagacagaggttgctgtgagccgagatagcatcactgcactccagcctaggcaacagaaatgagactctgtctgaaaaaataaaaataaataaaaaataaaaataagacagtcatcttatttacttctctatcacacagacacacacacacacacacacacacacacacacacacactaggaaaaagtcagtgaatgttattaacctctcacccagatcccaaaagggcaagttgaggttgtggaggagaaagatccttcccaacagcccttagctgataggcggcagagctggcatgcaaagctctgtctatctgactttggtgatatcatgtcatatggagacgttgcagaagacaccagacacagagttttccagaacagtcttcaaaacaagctggcagtgaccccttcagtctccatggaggttctgccctcagtcctgggcctgcaaaacctctgtcagccccagagatgaagactcagaaggcagatgccagtcagggtgggtgcagctggcaggtgccagtgaattcccaggggagagcgctgtgcctgtgaagacacgttcccctccatcaaacacaggagggtgctgccctggggacagaaagccagggactcagacgggctgggagggagtgctgcagtctggggtgggcactggtcacaagctggccctgagccccaatacagtgtagccagtggggccagctgcaggcggtaggcagtatgtccctgcagtgcagggcttggaaacagcatgtgtggctttccagccaccctacctaccacctcctcactgcaggccccagggatgtccctaacgtcttggagcctcagttgcctcatctgtggaaactcccttccccatatatctgtgacctgtttcctccctgtgccactcacagggaggtggtgacattaggtggcgacattaggtggcctgacttaggtggcagtactttgccacataatgtgtaagccatggggagtgagggttgtgtggggcctgctgagtctggcctttttggcctgtcctggaagactgggtccaggaagaggccctggccagtcaagggggtgggggctgcaaaccagctttgttttggtgtgctggaggggacacttcacgactgtactgatcagaccgtcctttgggagccaagcagagtctgtgtggctgggatctccaggatgaggtgacagggacccagattctaactcaaggtgggaagtcttcttacagtgcaggcagtaaactgagcggtgggctctgccagcaggcagctctccagccctgagggcacccaagccccagatggaggagctgttggaggtctccctgggacgtccaggaaagcagggaacgtgcccttcctaggtcctttcaccttgggatcttggcttaattttgatagccctccaccagctggtgtccccctcccaccgataagacaaacgacagacagcttctgcatgccgggctgtttgtattcattatctccattgagttgtctggtgagaacaagcccatgagaaagctgttatcagcatccctgttcacagatgggagcatggagaccagaggggacaggtggcctgcccaaggtcacacagctcttaggtagcagagccggcattcgagcccaggtctgacaggaagtccaactcctctcttccctggccaggatgaaagctggacagggaagccagtcacctgaaagcctcttgtgatgtggttgacgtgcctgtctttccctccaggccttggctttgtgactttaagcctgggagcacagggatgggttttatgacccctgggccaggggcagaagggtggtccctggatcagaaccctcccaccacagtctccccacctgccttctagaaccttctgactcttccattcccagaccgctctgagtgtcctcttggggccaagactgtggattgggtggagaagccagtatactacttttgagccattcacagcctggccagggggacagagcacaccctctgctgccctcccctgtcatccgggccatggtctgcagtccaggttctgccccctctcctgggcatgtggccccaggctggccctgaccagcttcctgtgagccccccatgtccatgcaggggacccttctgcaggcaggggctccagctgaacagaaggcagaatccccgtgagctggccaagaaagcatccactcaggagctcttcgtcatagcctccataaattctccagggaaacaagtcttcgccagctttggagagtcaggaggggaggaaaagagcgagcagggaagctccctctctaatagaaatgtgctcgtctgtgccttccgctgtccagttcacacactcccagacgtctctctggatcctcccagtcccctgcaaatgaggcactgtgaatggcccacttcacagatatggaaacggaggctccctgcgatcacccagtgagtgtgtggcaggacaggcccggcaagtcacctcccttctctgggcctcaggttccttgttggaaaactgaggtttcattcatgcagcctcaacaaatagggcactgggccggccctgagatgtgggggtcaatcaacactcatggagctcactcaccacaagcccgaagcactgtgactgtgtccgggttaggcttcccttgagttctgaggccacacaagcagggctgcgagtggagagtggccagggaagaggcgccggatgctggggtcgggagatgtgggtccaggcctccgttgctgtgggcctgggtttcctcatctgacaggctgcacccgtgtcctgcctctaacctggactcacgtgaacttcaggtgctggctcctcaggcagcactcagggcagagcagagcagtgcacatggccagggtgccaggtacaaggcccctccacagccctggcccagcctagggccccacctgtgtgccctaggactcagacgcctgcatgcgggctcaggaggagggccccggcaccgtggctgaaacaacctgtgaccacaggcgccctctccccacccctcatcgggtgtgtgtctctccctcactgtgtctgtcagtctctgtctctgcagaggtgtgcctctctgtctggtcccctccctgtgtacctgtctcacctgtctgtctctgtgtgtctctccctgtctgtctctgtgtttctgtctttctctcccctcactcccctgggccccttcctccttctctctgcagagacccctggagaagcccgacggcctggacgtgtccgaccagagcaaggagcacccgcagcacctctgcgagaagtgcaaggtcctgggctactactgccgtcgcgtgcagtgacgggctgcccgcccgcacccagagccaccccccgccagcccgaggagacgctgcttccctgtgctactccgaggggctgcgtgtcgccctgtgcatggggtgccctcgcaggcctgcggggctgggccgggggctcttagcgtccttgtcttgtgtgtgttgacaaacagtgttactgacattgctgccccccacaggccagggaaagcagggagtctggggctttttgcaggcgggcctggggtctcagtggaggggacaaaggcaagcaaaagcccatgtccaggagccctgggtgtccccacaggctcgcctctgagagcctctttggggtgagcagccttgtattggccacaggtgcactaaattgactgtgaatcccaaacctccccagaccagccaggccgcctgcccccacccagaaccttccggtttgccctgtatggaaagccactctcagaaatccctctttcctgagtcagcaatcgtggcaaggggacatgtgttccaacagcggctggggagtggacctctctgtcccttgcccaccttaagccccaaatccagaccccctctgacatcactggcattgcacctgggtgtgcccccctccccacgctatggacccagataggaggggttaggcatgggggaggcacagaatgctggagagatgcgtcctggtgaacgtggggcagcccctcccacgacccccaccagactgccttaggttttgtcagccccactccctttccttcccctctgcctcccacccactctgggggtccacatcaagatagctgggcccagtgtggaagcccagcgtgtctgttccagcagaaaggacacaagcctggtgttctggagacctcggctcaagtctttgccctgctgccgacgcattgtgtcaccttgggcaaggacttcgcatctccaggcctcagtttccccattagttaaatgacagcataacactagagagcagagggcccatttcagctctgttgttctgggattcaggctggccggtgctgtgtcctggagctttatttggggagtttcacccagaatggtgggagaaacctcccaggtgccaggtaccccgcatcgtgacccttcacttggtgtcttaggaagtcaagctgagggatgctgagtcctcccctgctggcccctgcagccccagccctgcttttcatcccccacccctgcaaacatggaggagccccctccttctcacctcggtctcctagcccctgacatggagaaccctgagacaagccacagaacccctcttttctaaaatggagacaataatttcctacctcccaagggagcagagaggcctcgtggcacgtccgtggccagggagcccactgtcctggctggcggcgggatcgtgcgctcctctgtctcccggatgagaagccccgtttccatggtcttgacccttcctttctcccggctgtcagaactgggtctcttgattttgcccctacattatgcctctgtgggaaaaaaaaaaaatcagaccaagaaatgagcctgaaattcagtgtttaccatggctcaaggatgcccatctggtgtccagttgccttttgtattcaaatgaaaatgctttgtacaactgaggagttacagtgaagtgttaaccaggggtccagggagcgagttgaaaagatggagtgagtgtatttgcagccagggagctgcagggtggatttgaggggccataccctctgagcacttaaaaaaggtatttgctccaggccaggcagcaggctgtggacacccttgccaccactggggactgccactgaggactccccgagcacgttgttccccgtcttctccaaggtgttgaggtgagctggggttggccccggcccaggcttctgtcccaaggagaagctgccactgacagtcatcctaccgcactgctaaagagaatgttcgcagtggtgggcggcgtgcctgtgccaacccttccagggacccggccatgggggaccttggcccaaggatgcctggggcctgccagctgtgctgcaaaggtggggggcccacaccctaaaactaacccaggccccagaccactggaggccagggcttccctgcacgggctaaggggagttgggatatcaccccaaagtgaccttgccagtgagctgttcagcaggtagccactgccctgccatctgtgcagagccagccaccttgggggctggggttcccgctttgaggcccaccttccatactccccttgactcggctctggctgaactggggaactctcttgtggtcagcaaagcccctgccatgcaggccaggtgccattgagaattaagtgctcagagggccaggagcccaggggatgggaaagtgtgtggttttagtacgttcaaaagggacaatcgcttgcagttggtagatctagcgatctagttgggagataatggtgtttaccccatatgaagtattcaatagttctacttgtgaatttgtatttattttgagttatacttgacacagaattccttttttaaaaaaatatgtgtgtattttggaaaaaaaattcatagatgttaaaatttctgcatggttaccagtttttctcacaacactgaatttggtagcttttcccgaaaaaatcttcacagtaattttttgtctgtatatatttgagggcctttttttaaaaaaaaaaaaagaaaagaaaaatataattgtttgatttttgagattaaaacaaacaaaaagagaggcattttcaaaatttcagaactttcaggagggcaagagaatatcaaacaaagatttctggaagtattttgccaaccttctggttgagctgcaagaaaatatttatggtgagaacttttctgtttcccgttattgggtttttggttggtttttgtttgttttttactatgctttggtctgtaaaaatatgcaactgaactacattcagaaggaaatattgtctacatagaatattatatgaagttggtacataattctgatgaggaaaaaaaatctttgcaattctttaagccatattgttgtttttctgtgttgttttccctggatgaaaatatcagtattaagtagacagcatattattcaagtgtttagacttattaatatgttcttgtcctgtatttatacatatgtgtattttggaaagtattgccttttttaagggaagctataattcgatacatagtgaaaaagggaatggtgacccctttgtgcctcttccactgaggataacaaacagcattgtaatccattctcttgcaccttcttcttcttatcttgttattacggttttattaattttgtagagggacagggagtgggcaaggggaagaagcagcttatttgactaaccagcccctctgtggtccaccagcgtcttggcttggtgggagggctctcaatcagcagggccccaggagggaagaagaagtggggcaaagcctggcctcgccgctcgggagctttgccatctgagccacgcctcctccaggccatgctccttgaacttggaaatgtcaaccggagcccttacaccagccctccagcatctaatagacttgaatctactctaaacgaatatttaatccaacctcactacattgtagctcagtccaacgactaaccctgaaatgggggtgttccagccttcagcgagatggccaagcggtcccctgggggctgtggcagcgggcttatccttctctgttgccaaccttgccgtccgacctcctccgcccccatgcggtgaccccgtccgtgtctgtgtctgtccatacgtgtgagtccagctaaaaagacaaaacagaacccgtgggcccagctcggaaggtgcgtggagaaggctccgacgtctccgaagtgcagcccttgggatggcattccgttgtgtgccttattcctggagaatctgtatacggctcgcctatagaaatatagcctcttcatgctgtattaaaaggacttttaaaagcaaaa

SEQ ID NO: 184 - DNA, 17470 bp, Homo sapiens
aaaattcacatcctgtgtaatcataaatactgctctaagaaagggacaggaagtctcagaggctggagagcagagcaccaagatcgttctggcaggaacagccagtgggaggttccagctgagcgctccccagaggtgagctgatccccagccacagcacacaggaccaggctgcgagaacaggtagacaccttggtttagatcatgacttttggggaagattgtgtgcttttgaaaagacagccagggaattggattatcatcctgtctctgattctgaccacctgtgtgagttggagcgtcagctcagtcccctttttgggtctcagtttactcacttgtcaaataagaaaattgggtaaaaccattcttaggtttccctcattgaggtgattttcctcaatgttctgcattctcctggtgtgtcactcagtcttacagagtctactctcaacaaatactgtgcaattagactgaatcttgcattagaaccccatggtcctactctaattctgtaatacagaaaattgctgggcagagctgttgacctccatgtcatgatttatcttcaaagcacggattttagagctgtcttgaaagctgtgggtccctccagtctatctcctcaaggcgaatgtggaaggacaaagcatcctctcagactgtggtgtttggagatgatagcatcagtctggagacttttgtgaaacataaagaatcttggttatataggattccttctaaaagtagcaacgtgtatctaaattcaagtgtcatagatttaaatgtaataattccacttccatacatcactgtgagataattaaatgcaggaggtatcacaaaagtgcaaagatgttcattattgcattgttcatagtggcaaaaagaaaaaatagaaaccacctaaatagtcatgaacatgtgattgattaaatgaatctagagacctccatttatttaaatataccatttggctttttggttgtagtaaaatatgcttaaaataattgtagccttttaaccatgtgtttttttgttgttttttgtttgtttgtttgtttgttttttaattgagaaagagttttgctcagtcacccaggctagagtgcgtgatctcggcttactgcaaccactgtcttccaggttcaagcgattctcccatctcagcctcctgagtagctgggattacaggcactcaccatcatgcctggctaatttttgtatttttttagtagagacggggtttcaccatgttggccacgctggtcttgaattcctgacctcaggtgatctgcccgcctcggcctcccaaagtgctaggattacaggcatgagccgctgcacccagccttaaccatttttaggtgtacagttcagtggcattaagcacattcacaccattgtgcaaccatcaccaccacccaactccagaactttcttgtcttcccaaactggaactccgtgcccattaaacaatagctttccattcccctctcccgccagcccctggcaaccaccattctactttcagtgaatttgactcttctaggtgcctcacataagtagaatcatacaatatttgtccttttgtgactggattatttcacttgccatattgtcttcaaggttcatccatgttgtgccatgtatcagaatctatcatttgcttttaaatttaggctttttattatttctattcatcggtcaaagatgtctacagaataatgttgagtacaaaaagaacagttataaaatggcatggatagaatgactatttccgtagaattgtgaatgtctgtgaacatatataaagaggagagagataaagtgacagatgggaagagagaatgtaaagaatatgtgcataggaaacaagagtgatcgggtggcagttgaaagttaaggagctaatttgttttcttcttcaaactgtattcccttgtaatggtggtactttatgcactctttcaaacagaacaaacagttaagaaataacaaaggaaaataaatgttcatggtatcagataggctatagcctgaaagtatcaattaaactttcgagtcctagcttcaggctgagaatcaagcattttctgcagtccttaggtatgagattcgaaaaataaagaaaggaacccagaactcaggaggctggtgacgaagactagtaggaaggagtctagttggtatatttgggctattgagccacacagagcaaggtaaaagccaagtttctacaacatgaaagcaagttgggaaaaagaaatcttcaacctatattccctaagatcagcaatgtccctgggagaggatatggaactgatgagtggcagccaatgcttcaacaataggggaggaagaatagagaggatgagaatcagttgtagctagccgggcaagaacaaacctacagggatatagaagagctctggtgttagatggcctgtgcccaaatcttgcctccactacctgctagataagcaatcttgcacaagctatttcacctctccaagcctcatttttcttatcttcaaagttcagcacccatctctgagactgcagattaaatgagactgtcacaaagctcttaatagaatgccacattcatagtacgtgcccaatcaatgttagcaatgattatcattttatcatgaactactgtttgattctggaacctagaatttctctaagcctgacactttttctccttctctggctttaaagatgtgctggaaggctcaccctgactccactgcagggattcagcttcaacattattcccctcataggacatgtaacctcacccacacttctacccagatttcaaaattccaagaaatgaaaactatctccttaaacaaagagaactttaggtttaataattcttcagataaagtatctcatgcccggagagcatgagaaactagactaaggcacagatctaggagtagaaataaaatggaggtccaaacatggatcgactattatggaacacctgataaaactcagagagttacaacaaaagacactcacgtgtgtcattcaaatcctcacaagagtccttcaggatagtgtcattatccttattttacagataaggaaactggggatgaatgagggaaagtatcctgcctacggccagctcatcaatatcagaactgggcttccaatgaatattagataaaactgatatgttttgggagtttatcacatgcctccccctatgctgagtccattatatgtgtcatcttatccaacctgtaccacaaacctatgaagtggtgaaaataccttgcccagggtgagtttagcagtaactggtggatatgggatctgaacacacgactggactccaagacatatggtcagatgtgcaactagatgcctaggcattggactcccatcccagtgcacttttccatctccctcactaggaagagattctaggtgtcatttccaatttttacatgttcttcactccacccaagagaggccagaaccattcctaaagcaccaacacattgaggcaaaatgtcaggcagcagagctgtggcacctttcaaggatgacaagcctttaactaaactctggccttcagtagggagaatgttgagctgaaaacaaatctgggcaacatttcaggtgctgagccttgttgctgacaccacagaggcccagcaatgctgctgagttagtggtggcagacaacttgctcctggaatctacaagggaactggaaatgttaggaaggaagaaaggaaggaagaggaagaggaggagaattaacatggcatagagaaaaaaatatcacaagcgtctgagccagacaagtctcaatccagtcatgtaaacacaggctgttaatatttgctaccatatattgaacacattctaagtgccaggctaagtactttatgtgactatttcattcaataaaagtcacttgagcttattagccccaggtttctaatgtataaaattgatttaataacatgtaagttacagggttgttataaggattagagctgcaatggtctaatgcttggaattcagcaggagttaagtaaatgtttacattactaattacgaagccaatataagcaaggaggaagattccggatgggacaggccatctcgctataggaaaggaaagtggaacagcattcatcctcaacatttttacgaagacaaaatgaagactggagtagaagactgatcagtgcaggtgtagcataaaagtgtaatcctggaagatgtggtgtgagaaggtagcacaagtgaagcagagatacaggagatagggaagggaagctggaagcagaggtcactggagggagagggagatggacacattcagggctacaaagcaagttctatgtgatttgctcacctctcaattgtgggacccctcaaaatgtgtacagtactctcccagtgacatgcttcttgaccacaatggatgaactgtgcccagcatgcccactttccaatgctccactgatccccatgttttgtttctgaaggacaaccagccttggaataatggcaaataccttcttaagttcctacaaagtatggtccctgggaagtttatgtctgtaagtcaaaccttgggaagtaactgagttttgatgcctcttccagcatcatcagcatcatgctattacaatcccaaaccatgggggtttctcacagctttacaccaaagggcatcactatccctcaaagagagaaacctggacacatgtaccaaaacgaagattacctgcagaacgggctgccaacagaaaccaccgttcttggggtaagtccacctcattataaggggaatactgagaaaatactttgtaaatgtatctagactacagatctacagtgggtctgggaaactctttcactcttttctggctgactccaggctaatgaggacatgaaatggagctttaagggaagactcttaaagctctgcagcagtttctagaaactaaaaccactagatctttttcactagcatgcttcacaattaacaggttagtctttcttattttatttatttatatatttatttattttgagacagaatctccctctgtcacccagcatggagtgcagtggcacgatctcagctcactgcaacctccgcctcctgggttcaagtgattcttctgcctcagcctcccgagtagctgggactatgggtgcacgccaccacgcccggctaatttttgtattcttagtagagatggggtttcaccatactggccaggctggtcttgaactcctgaccttgtgatctgcccgccttggcctcccaaagtgctgggattacaggcatgagccactgtgcccagccacaaattagtctttcttattttgtcattagtacagtaaaaattttctatttaaccatatggattttactcaatatgattaaattaactttgagcttatttttcaaatattttgagatgagacgatcaagactaatctcatgacccatttttccccgttcatatgagtaactataagacatccaagtgtcccagatcatcatccctcatatccagaactttaatctccatgtggttttgaataccctcttataatacccaggtcctattcactgcctatttagatggatctccctgccctgtttctttacaatctattcttagtacagcaggtagggtactcttttaaaaatgaaagttagatcatgtattctcctggctcaaaattatccagtgggattccttttttgctcaaaatgaaaagcaaagttggtaaaacatagcctaaaaatccctacatagtttgtaccatgcctccagtacttcacaagcctcatgtcctactactttgctcttaactctattctgccttgcatggaacttgtctgtacctttacagacaagacatagtacacatataagctctccaatggtagtgattttcatttgcttcattccctcgtgcctggcacacaacatacctgttgtggtattcaataactgttgatgatgtgaatggttgacttctttttttatttctcctatgtttgcatcatctttcaattgcacatgcattaaactatgagcaaaagcatgggctttagagcaagctaacagctaaacttcagttcttccacttgcgaaataattattattaaaatccaatgatgaacaaaataagatgaattacagcagaagagatgacctgctctatctaatttcaactgaaaaatctcttcattaacactcctgtgaaaagtttgctctctatttccacctcactggacaacttttttatctacttttcaagaaaataaatttaaaaactgtcaagtatctttttcaaaaaaagttaaaatgtgtgtatgatcactttccgatttgctggtttaataatcctatcagaaaagaagaggttagctatacatgactttctctagaagcatatcgattggctccttgtaacatttttcctctttaatataacaaattataatgtattttatactctttatactttaccgtgtgcattcaaataatcacttttatctgtttgaagtgcagtctagatttcctgtcttctctcttgtagactgtccagatcctgtgttgcctgttgatttcaagtctgggggccatcttggtttttgctccctacccctcccacttcaatccagcaatttccaccactttgatgtctgggtacccatttttaggagctctgtgtgtgagtagaatggggactctaagaggggacatgctttataaatgctaaccaggtgcatagtcgtggagtgactcagactccaagaggccaggaggcaaaaggcggcaaggcctcgactttccttctatcattgccccacgtcacatttcccctattcaagaagagcagcagagagacttaatctgtcttcctgcagagcagggggcaagagggaatggtaatacaatgggtataccagcacagaatttcttacctggcattacagcatacctctagaaaagtggatgattttccatatccctctttgaggctttgatgaggccattggattccctccattgtaagaataatcaacttttcaggtagagagtgagaaggccatttttaaacaataaaacgagcaccactggttgatgccacaggtttgcagagatttggattaacaagggtaagattcatgggaggcagggacatgcttgctgtgtgtccagaggtaaccctgagcactagagaaactctctttgctgccttccacctaatggctcatgaaaaagggcccagtagatccatttttcagagagtggccagggcagactcacacttcccacaaagggttatttcttctccacgtagtatttggtacaaaggataaaaatcaaatattctgggcaaatgaactatactaaggtaccacttctgtgtggatacagtccctgtgtgaacacaaactgtgcagtcacataaggaggccctggtcctgccccagagcacaatttgtccttgacttctcctgtaaccagtggttgtgggccccacatctccttagagaagctagcgttagctcatactggaccctctttgcctgtgattattcaatatccaagccacacacttaagcaacttttcagcttctcagaatacccttcctctgccagctggatctttaataccactgagattaaatactgatttctggggctttatgataaagacttcacgtctgagcctgctcttcccactttcctcgactcccattctgactcaagcaacatacaccaataacttccagtccatgtgtttctgcaccttgtcccatcagagcctctttcctgagtgcttctgttggctgttccaatctctctgtccattcaagtcattggtccatctcaacctcctctctttcaaccctgtaatttagtaacactcttctccttcccaggtacaccttttctccaggcctcctcagttcctagtgatttccactaaaacaaatccaacccctctgtgcatctgcatgtcattcaaagtcaatatagacattcttatatcaggtgggaattaggcctatctagcaatatagatccacaagatttctgcagtgttctctccctaaaagttttccaacatcactttttgattgagtgattgacagtgacatggtgggcacatttccacaagacaactgaactgatcatttctctctcttctgggcagtttggcattactggatccctctcaattatctctggaaaacaatcaactaagccctttgtaagtataaggaccatcaaatctcagctggttggaattgaaggaacgtcagagttaattcttctagtttaaaaatccctattttacaatttagagagaaaaagcttagaacaggctaggaagcccaggttttcctggctgtcccattggtagaaccaagagtagagcccaaatttcttgccttctagaccagtgctctttcgtctacacaatgttgctcctggattatattccaagcttggaggaggtttacctcagttatttaaaaagtgtacatttttaaatgtaccatggactctttatagcttgtaaccttgaccttgaataaggtagccacccatcccagagagagcctacagatccttttttctataaaacctgcctcttggggttctttttgatgccaaatgtccccattcatagagttgggacttcacacaaattctagcccttcagcgtcagggtgaccaattgtttggttttcccaggactgtctcagttttagcccagaaagcctatatcctgggaaaccccttactccccaggcaaagcagaataactggtttaccctactctgtgaccgtggtaacaagttgaaagaagtccatgatatattttcaaagttctactatttaagcaactgaaataaacttctttcagtcaaatatcaggtggggaggcattcattcccctgtcagaagagggtgttgccgtcttcatccaggctggaggagactatttccatccaaagactcatgcttgataattggatgtttgagaaaaaaaatcagtttaaagtaaggtgggagaaaatgagggtgatggagtaggggtgagggggatgtctgcaatgtcagcactgattgcagcaccaaactcaaagacaataccactcatgccactgccaacatacccctggcttcctcaacaactttagaattattatattgccctaagtgcatctagaatatgacctttggtccctccctagaaacccaatgtatgtcttcttacttaaaagagcggcttcagagaaaagacaaaagcaaactgaagaagttggaatacctacctacaggtggatcaggcctatgagaaccacattcaccacaccatttcccaactcctcttctacattttaggagacaggattctcccatagcatgacgattcactagcaaagacactgatgtgccaggctctgtgcgaggtttccagcacatgctcctctctgtttaagcatcactggaagacaatgtatgttgggaaggatggttgtcctgcccttttctactccagctctgtagctatatggattcatgtgctgagtctttgaaggaaaagtagtcccagtgggcagtatctttgcccaaagctaccatatgagcaatggagcccacatgttgttctttgtcccacttgtggagcccacattgttgtcaagtccaagcatagatttccctttctgtgtattcagtgcatttgggaagccacttctgagatcagaagattcatcttccacattttataaaagagataactgaagcccagagtaagaaggacttgctcaagcacacagatggatcagtgacagatgggtcagtgacagagctgggataggaggagaggatttcagtttctaagtccagaactatgactccaaccaatgaatgctgtgaactcttcaaaaccctcttccataatcctgggttctagactgcagcttcaatcatcaggagcatataccagcctcatgcaccatccatgtgtcctcatctgtgcctagccaggccctgtatcttcttgagtcaggatgtggcttttccctaaatcacctctatgggtgtgtggcagggaagagagaaaggctgctacggagagaagcaaaggctttatagctgcttcctccctttctccctccaaggtttgtgggaaaagtggctacagtctgataatatttctgtttgtgaatgggtggagagagaagcacagggtctaagcccatgtgcctctgcctcatgccctgtcacttaggaaaatcgaaggcatatgcttgtcatattgaacaaatattgattgtcaattcaagatcaattgcttgtcaattgaaagcctattttatgttcccacagacctatagataggttttccaacttttccagtttgcctccaccttttctctgaagctgctcttttatgtaaatcaaagtcatggattcagtttaccagaggggaccgaagtccatattctagaagccctgaaggcaacagaatgattctaaggctattgaggaagtcatgggagatgttggcagtgacctgagcagcactgtctctatcttgagtgctatagagagtcaatgggccagaacccctctccctaaggaggaattatccatgcattttcttattcaataagcatttactaattatatcacatgattaactaaatagcgacaagagatacaaagatgaataaaacacagtttgtgcccacacaaggaaacaggaaggaaacagacccaaggaagcaccattgcagtacaatggacagaggactaatagtgtcacgtgctgattctgtgatgagaacccaatgcagagtttctcttccaggacctgagcagcttgacctcaaatgcagtgagttctgttactgcaggagcaggcctcttcctccttgctgacagcatggtagccctgaggactgcctctcaacattgtggctcagaaatggattatctatcctcattgccttattcggagtactattatccaatatatgaaatcaaagattgtctcctgaccagtgtcagtttaacagtgagtagtttcagactgaatatcctgtcatgtgaaatctctgtgtctcccctttgcatactctctgcttttctggcagtctctggttggtcggtccgaatgcctggagacagacagaaataaacaaaaacttgtggttggaagaggcctgtctgctgactgcatggtgtgggggatgtactatagaaagtcaaaagaggaaatcatgaaggacagtagggagtctatccctccactggtctttcttaatcacaaacgttccaaccttaatgggtttaactcttaaagtacaacctttgttgtactcatcacaggcagaaatattcttcctactcatcacaggcagaaatattcttcatttgaattatattttaatttgggattcttttgggttcttttccaggggttggatgcccctaccccttaaagatgcttgtcttctgatcatcagtgaattgaggactagcagaggctgtacggtgtttaagttaatcttcaaatgcaagcctgtatgctacattatgttaggcacaaaacttgaaccttaagtccaaatacatagttattttgtactttggtctaacagggctgacagagagtggtgggaagggagacaacggatttgacttctagaaaaaatgtcaacctctctgggcagcattttcttggcacctttctcccaaacttgatgatcactacctgttcgtggtgacaagccttgcttattcaatcctataaatatagtatcatggtgttaaaaccataaaccagtggccttttaagaagaaagacttcttcctctatgaatcctcctagtaggagcacagggaacccaaggtagtatctctcattcccttggatccatctatctcacaaatctcagaaaatgtgtgcaagcttttgcactcctgtgggtctgctcatgtgacccagagattgtcaaaagcaacccctttggttcaggagcttgaggaagtggaagagcacagagacctgtctggaggaaacccagtagatagtgtcatcctggtgtaggacagacatgtggtaaagcaatgggggtgggagaggcatattgggggtttaatttaaagaaaatgaatttcattaccccaaactgcttcccattctgagacaactggagtccaaaagaacttcctacaatatgagagaagttgcaacatagcagactaagcagactccaaaggcctactctttgttaattaacacagcaattacctgaacaaaagtaatgaaattttaaaaattaaaaaatatatagccaaagttggaagaagaaaggaagggagggcagaaggaaaaacaaatctaagaagaaagatgacttaggttccagaagctaagaaggatcctaaagccaaatcatcaaacaagagctgaggccaaaataccaaggaagtctgaataggaatattggtattagaggctaggatcacacagttttaacatccatgacaagatttggcattggacagggccataaagctcatatggagtaccctgcaaaaatgttgaaagctgatactgaatatttactcaatttgtgaaaataatataaggaaaattctgcccaacatcccaagaagtttcaagaaaaccttccgtcagctcactaagctttgtgcaagtgtgccatctgaattcataattacatataaaatagggggacctcaaataaaagcattaagttaaaaactgttacgagatatgtgaaacttctaaggttctagcagaatcaaatctaaaactactatctaaggagatgtccgtaaacccaacttataagatgcctccctatcaaagaaccctaccactaccaccatctacaaactgaagttatctaataaccaaaatattatgagaaacataacaacagcacaaaaaaatgagtagcggcagcaaatggggaaacatgaaagtcagaagctcaagaattggagataacataataatttgaacaaggctattatgaaaatacattttaaatcattaaagatgtttaaaaagtaatagaaaccaggccaggtgcagtggctcacaactgtaattccagcacattgggaggctgaggcgggtggatcacccgaggccaggagtttgagaccagcctggccaacatggtgaaatgctgtctctactaaaaatacaaaaattagtcagggagggtggtacatgcctgtaatcctagctacttgggaggctgaggcaggggaatcacttgaactcgggaggcagaggttgcagtgagctgagatcacaccattgcactccagactgggtgacagaatgagaccctgtctaaaaaaaaaaaaaaaagtaatagaaaccaaaatggaaaaaaaaaaaaaggacagtaaaggaaaaaaaagatatgtgcatttgagaaaaaaatgaaatcacatacttggaaatgaaaattgtctttgaaattaaaaactgagcagatcagttaaacagcagattcaatatattcaaggaaacaaagagtgaaatggaatttagatttgattaaatcacacagaacacaacacattatgtgtgtttggaaaagatggatgaaagcctaaaaggtatgatggatgcagggaagtggagaggttcagtacatatctagtaggagtcccagtgagagattataaaagagagagtatatgcaaaagtaaataactagaaattttttagaatttaataaaaacatgagatttcagattgaaggaatgcattgagaccactgcaggatacacagaatcaaatacacacctagaaatatcatcatgacaataaaaacaccatagtcaaaaagaaaataataaaagcaaccagagataagtggcagattactctcatctatcattaggtgggataccaaagttctgagatgatgccgttgctgcttatttcccttcatctattaagaaatctgaaaaagaaagcagaaaagaggattaagcaattttccctgtctccttttctctgcattgctggagcctcatcgccctgtctcctcttagccaggcacaagggctagcttgtcttgggtaccagccattcatgtcctgatttgcagggtgtcctagtggtgatgctcatcttcactgtgctggagctcttattagctgcatacagttctgtcttttggtggaaacagctctactccaacaaccctggggtgagtatgctgacatgtcgcctgatacctgctgtgtctcaggtccaggctacaataatccaacctcaaaaagtggcaaaaagaagaatcaattattgttcatgaggtgcatgtggaaggccacttttataattaaaaaaatgagtttaacagtgaaaccccatctctactaaaaatatgaaaaactagccaggtgcagtggcacacgcctgtagtcccagctagttgggaggctgaggcaggagaattgcttgaacccaggaagtggaggttgcagtgagctgagatcacaccactgcactgcagcctgggtgacagagtgagactcagtctcaaaaaaaaaaaagagtttgtataaatgggctccttctggaggacactctggtcatctgggatcagctggtgtctactgggaagcagaccagttagagaattgcttaatatgaagctagttggttttagaaatcacatagcccaacccctcatgaaagaaccacggcttggataaaattacatagaaaatgaatgacacagactattgggctgagaatgagaacgcgtatcccctcacttttatcgggaacacagctacctgcctcccgagagagtctccctagccaagtttccttgttaatgtgatgagactttactagaatgtctctgtcctgtttatgcttccctgtgctcttccttacatccccttagctcttgatgttataattttaaaatattttcatttcccctaaaggctacaacaacaaaagaaatgtttatagaatttggatgaattatgatttaactatgatcctatttaaaatagtaaaataattagcagactggagaattgcattatttttaattaatattgctgcaattacatattatggcaaagttggaagaactagtactacacaaaacttggggaaaaggtattatgagttatcttttttaatctccgaaatcaaagtttaaaaattctaaccaattatgtattttctagagttcattttcctcgacccagtcacaagatcatatccaacaggtcaaaaagagttcttcacggtcttggatataagtaactcttggcctcagaggaaggaaaagcaactcaacactcatggtcaagtgtgattagactttcctgaaatctctgccattttagatactgtgaaacaaactaaaaaaaaaaaagcttttgttttgtatttgtttactatgagtcgttatttaatttctcttgaaaataatttcctcaaagcccaagtcaataaatgttatcagccagtcttccaaaatggtcataaactttataaactgctttgggtaaactgagcagaaggtgatacacagaagggaaaatgtgcactcatgctagtgtgaatttggtaagttgcgtgactctgcaggctgtttctgtattattttcacactcatattgcttaaatattacatattagggattgtaagaaaactttaattaaaaattaaagactatatataattaaactactctgccctggacactctctgagaaacagatctactgggccctttttcatgagccattaggtggaagacagcaaagagatcttctcaagtgcttaggattacctctcaacacacagcaagcatgtccctgcctcccatgaatcttaccatgtaaatccaaatctctgcaatcctgtggcaccaaccagtggtgctcattctattgtttaaaaatggccttcttggctgggcgcggtggctcactcctgtaatcccagcactttggtaggccgaggtggacggatcacccgaggtcaggagtttgagaccagcctggccaacaaggtgaaaccctgtctctactaaaaatacaaaaaattagccaggcatggtggtgcgcacctgtagttccagctacttgggaggctgaggcagaagaatcacttgaacccgggaaggggaggttgcagtgagcggagactgcaccactgcattccagcccggcctacaagaacaaaactccatctcaaaataaataaaaaaataaataaaaataaaaatagactatatatagtctttgaattcatttattttaaataaatgaataaaataaaataaaaaagaatattcagtcgttggcacataaactatgttctcttctgtcatttcagggtaggagtcaatgaagacatcttagtcttaacaagttacagataatctctgactggcatgttttctgcttctagcttggagctaaatgctgctcatgctgaaaagaataatgtctatttctttgtttgggtattagctctattttgatctatagcacagttttgtaattcagatcatcacccctgcactttgtaccacatgggcgtattctttcttcccagtcattgctgcaattatcttgtctgttctttgtgtaatatgttctgtgtgagcctctgcattaaactcgatttcttgggcaattatggaaattccagtgtggctgcagtttaactttgcactctctatgcatatgaggtttcctaaataaatgaggagtagcatagtttaaaatatatatatcttataactttctacaacaaagaattattgagtccaaatgtcatcagtgctcattttgagataccctgctatcgatggtcgctacaaaccaggaaatactcaagttattatgtgtatacattggttttagttttatgaaacaatttaccttcatgatctcatagttaaaattgtaataaatttaggaatataaaggatcaatatgggaagcaaaatttctaaaggcagtttctgttgttttaattagtatttgtgtagttcaaaccaggaaggatttgactatcattagattttgcttaactttatgaaagctaaaatattctctgttataaaggggcaactccatctggtcctatagcatctttactactgatttttttttgtttaatttgaaaatgcaaagaattgttaaatgttcttaaatgttctcactacaaaaaaagaaaaaagataactacgtgaggtgatggatatgttaattagctggattgtggtaatcattttggaatgtatatgtatatcaaaacatgtagtacaccctaaatatatataatttttatttgtcaaatatacctcaataaagatggaaaaaaatcgaaattc

SEQ ID NO: 185 - DNA, 843307 bp, Homo sapiens
cgcgccgccggccctagtctgcctgttttcgactcgcgctccggctgctgtcacttggctctctggctggagcttgaggacgcaaggagggtttgtcactggcagactcgagactgtaggcactgccatggcccctgtgctcagtaaggactcggcggacatcgaggtacggacttcgcgccggctcgtcggtggtggcggggtggtggggagtgctctgcgggtaggtgccggggaggcccccgcggcccccgcaccccggagagtgagagacgcgggaaagtttcccccgtgggagctctgcgggggagcggaggagcgcggagccacaggcccgcgtgggcaggcggggagctcaggggaggactttccgctactggaggggttgccctttgcgtcgggacctgtttacttcggaagagatttcaggaagcctgtcttgtcctcctctgaatgtcagtgactgaagaagcactggagttccagagaggtggactctagggggtaggagtgcccatttcccacacgttctaccccttcacctcctgtatgtcgtttctggacacctccactgcccccatttccaatagctgaatcctgctatttgcaaaggtgaagcatagaaataaaacatctgtgtgtcagctgtagcagtcgcctctagtcatagtattgtttatgaaataatttaacatggagagaatggaacgaagtattcagaacatgaaaaatgcagtgccctcagaaaaactaactgtatttttctctcctctcaacggtttttgattccctcttgcactccgtttctgttaaaaaaaatctttttttatgtaaataaggtcctacctgaaacgacatggcatttcctttctctctagtatcttaatatatgcgatgaaaaggatttaattatcaacagtgattttacacatactaaacctaggtcagcacttttgagctaagacaaactgatttttagttttctgttttgtttggggcttttctttatttgagtcttctactctggtagaaaattatgtgtgtgtgtgttttctttagaaataacaaaattttcctttcgtcagtccttttggcggcttaagtaaaagttttgcaaaccacctgtttgcaaaatagctgcttttgccacattttgcctccgtaattgaagaaactttatattctgggaggaagtagtcctgttttctccaggctccataacttggtttgaaaaatcattttagtaacaagagccaaagtgtattatgtggacatctctggttagtttacttttggtttctgttttggagagttgactttttgatattgagcaatatgatatatttaacaaatagttgttcatctgtgtgcaggataatagatacttgtctttttctatatttcatttagggtagtctattcctttttggtccttgtgactttgacttaactttttaaaaaattttatttactaagtcgaaaaacaagcttctgacagtattaaggcagtattgatttaagatatcggagttgacttaggatgggtggcttttggctctttaatttcagaatggtgtgttatctgcttaactgatttctttctctgcagttgtcttcgaaatcagttcttacattctactgaggagaaagatgccagtgaaacattgaatgccaagcttgatttcatatattgtttcaactaagaacatttaagaagcccatccttcccactccctccactcaattcaaccttagtctatatggccagtttgcctaatattacttttaatctagattgctggtgttcaaacaccttcagctcttatgtagttcatatgtgcaacactttaatcagtaacatctttcatcactcacagcaccttacttttccctcaaagtaatacccgtgattcatgagctagaataccatgaaagagcatgaaattaatcattaaaatataatgcagtgaggaaaaatacattaagcttaggggagcacattcaagcataaatgcctcagttgatcctattgatttaccaaagttcatttttgtgttgaagaattagaatgaattataaaggctcagttttccatcaaatttgaatgcttttcttgaacaaattcattacaaccattgtctagagatctgattgtgatcattgttttagcttcaaatacatggataagcaagtaatattttaaaaatattggtatgaagcagttaatgaatgtgataagaacacattgataaatgtgaaaagtacttgacaattgttaaaagaacagaaggtgatgataacaacctactctaatagtgactgacttttccctatgagctaactacagaacctcaggtttcagtgaaacagccaagaaatatctttgtttctgggggaaaagttattgaggtatatataaaggtgctttgtgtgcctgcttcataatttctagtctgaatccaatatcacatcaggatttgacggttaggaacatggaaaacaatcagatcaccaaactccatagctggaatatccctgggctgggagataggcaaggaaaggatgtgttacttggtaataggacctagctcattactcagaattgttgttgttgttgttgtaatcatagaagttgcatgagaaatcatgttttttttcagatatattaatgtggttcagagcctggcttctgaaaccaactgcctctgattgaggtctaactttaagctgtgtgtttgggcaagttagcctctctgaattgcacatggaaaatctgctaaggataataaacaaatgtcacaagttgacagcatcttgttgggaaaaaggacaaaaatgttaaaaaataaagataacagaaaaatatatcttattctcaggaaaatcacttccaatgaaatgattagcattttaaagtccgttaatagtagttatatgcttttagaagttattttgctttgtgagtgtactgtttggatacagtctgaattttgtcaacgatgactttaatacaaactctcctgggatggtttcaaagaaggttagtattggacattggtcactttcccaggcctcagcagtaacttaacagcacttcttcatttagattgaatttacagccagtatattgtgaatatctgcacacttgaaaggaaatgagaattattttgaaacagtactcttttgttcaagaccttgttcccctccaccggcaaggataatgagaatagactttgaaagtatatatatctaaacgaaatgtatgcagctgcagcaagcttttaactatttgaatactagtacttttgatatatatttgtagccaaaccaagttgctatctgttactgtactgctaccacagtcacaatcacaaggcccattccttgaatgatcagttagtgaatgttaaagggttataaacttaattcacatttaccctaaatgaaaaagggattttagtccattgtccacaaaatcaaatgcattttaagtcaaacagaaatggtttcggaattactgatactgtgacttctattcatttgaaaaggtaattgggaattttctgtatgattaactaggaaaatgagattaaaaatagcgaatttggaaaatagaagcataatgggaaagacttggagaaagtggactttacaaattttgaaacaaggaaagtcatgggttataaattggcagagatggcaaaaaaattttcagaacatcttttatcataattgcctttgctgctggggaggaaggagaatcatggatccaaaaaagataataaagattccactttatacaaagccatgagttgtttattgatttaaatggatatatttttactgaatgtgtaagcatcagtcatttcttttctccttccttttattgactgggcactgcagatcttttggaaatatattcttaaataaattaagacttttaaagctttaactttttaaaactattttgtgagttagagttgttgaaaacatgcttgtacttcctactttaagctgttttgtgggccatagttttactttaaagtgtttctcctttctaaggagtttagctggatagtagaaatgtgtctgattatctgatttgaggagtcactgattctaatggtagcttcctgtagttttaaggtactgcatatttctgtagttgagtgtgttgatatgtgtttcagtgcagttttttaaaatagagatgggggtctcagtatattgcccgggctggccttgtactcttgggctcaagcgaacctttcagcttggcccaccaaagttgtgggcagtttaaagaaaaattctatcctttgcatatgaattcagatgaatagttttggtagtttaattaaaatctgggagattaatgactaatgatggatcttgatggagggtgatttttagattggatctgcttaatcttaatgatagcaaatggtgttgactgattgcttaattgtaaagtgtgctggaatttggtagcctcctttgttacattctagaagaaaaattcacttttaaaaagattatgagttcatatcctttgtagggacatggatgaagctggaaaccatcattctcagcaaactatcacaaggacaaaaaaccaaacaccgcatgttctcactcataggtgggaattgagcaataagaacacatgaacacaggaaggggaacatcacacaccggggcctgttgtggggtcgggaggagggatagcatttggagatatacctaatgttaaatgacgagttactgggtgcagcacaccaacatggcacatgtatatatatgtaactaacctgcacgttgtacacatgtaccctaaaacttaaagtataataataaaaaaagatgaatattaacagtaaggaattgataaggacactaagaagatctagagtcaaaatactgattcagttatggaagatctttaagcaatcatacctttctttaactatttgaatacagcatcttaccaaactctgtataaactggcaacaacacaagggctgaaagctggaacccctagtaaaataaagatgtctgatcactgtgggagaattctaataattagcgtaaatgtaagtaatagtttggaacactaaaactagaagacaatgagactgaaaaaagattgtcgtaaaatatcatgacaaagaaaatctgatgagatttgatataatccaggcttcaatacagctaaagaggagatcaaaatggaggattggccaatttatttttctgcctctcagctgtatgaatgcatgacaaatatgttgcagagcccttcagtccttaaaactgtaaagaaaattttattttgtttatattccaccttaattaaaaatatttaataaggcattgtaagattacacctttatctataattgggactttgattttaaaatgtgacatatttaccttctggacttcatttgctcataatcctccatatcaagacagaaggtgtttttggcctcaaatatcagtcatgtgggtgttcactgatatcctggagccaattatactactgagataactcttaataggattatgtctttcctgtggtttataattattactgcttccattgcttttaattaaaatgttacactagtacatatgaaacatctgcattcaaactcaacatataacttttagccagttcaccatgaatacatatatatttatatgtattgaggaattaagtacttttatatgaagttatttattttgtatctccccaaatcaagcttcctttcatggttagtacaaaaagaaaacattgtatttaaacagacctgggttagaatcctggcactattttattttatttgtgtgactgtggtcagcttctttcttggactgccatttcttcttctgtgaattgaatttaatcctatgtatttcatgcaatagctataaggattaattggagtcacatacacaaaatgcttcagacagcatttgtcacataaatatatgcttttttaattggttacacttattttaaatgttattactgcgtctatcatgtacattatataaacatcaattggcaagaatttgtttttgctctagtaatcaactagtggtattgaagtctgttagaatctatgagaaagggaggagttaatgaagttaaaagattatgaaagaggtgcattatagatttataaatgttgcatatatctattgtgaaaaagttactgaattaacatttgtcaatattatgagggagattggggagtttctgaaattcagatcaatttaaagagacccatttcatttcatttctgtctaaaaatatgtttttagtacctgttgtactgcgagcccactggtgtaagtttcagatggtacaaaggaagtatatggcctaggttttgtttatacatgactattcacatctattacgtaggttaataagattcaaatccaggctagccccatcctttttttactgcaacatacatatggattgattcttctgtgtttttctgagtgtttttgagactagatcagggctaatgcataggtgaaaattattttttggcattctcatagaaatgtagaaggcatttgacattaatttttttctgaaaagaaattcctacataattaaaacaaacccttgtatttccatgtgctaactggagtaaactcatcttctttctaagcaaacatattagcttcaaaaacaatttttttctaaacttttaagcatccctaaacacactgcatttgcttatgaataactcttttagctcctaggaaacagttggttggagataacctattttgcaccaggaaaaggtaaagtgtgatcttactgagagatgactcatatattacactttttatactagctataataatttcatttctttgagaattttaccttggctgtgtaacagcatttttgctagactttacctccatcataataattaaagagacaatctgtgtccctacctcccaggtgcttggaaattgatattataagcacttatgaatgtccccttgaggcactcttgactgagccactttgaagaaaaatctcttcatcaataattaatccctgagggccacttctcaggggacccacacaaaattacatgtcaactccaggcctgatttatataggaggcgatcatggatggagccctgactgcacttcctcctcccccccatgttttattcctcacctctctctgctggttctcctccacctcaacccctcaaagcccccagcacttttacttctctcccaaaactttatcctccaacttacaactcagtgtacctacacagaattgactcacccggtagatcttaatctttatgaaattctttaagactgacatgaaaaattgtagcatgttaaaatttatagaaacattaccatgcctaatgaaaaggtcgtgtgaaaattgccagcaaaatagtagaatgtgtatttactatttgttaattaaaataagtacatttcccaagatacaggataagcctggggataattttgctctatgccatagatcccttgctctctgaccttgtgggaatcattcagccactgtgaagagttttctgatcttcagtgagtttgctgttgatcagtcttttaaggatggtttgaaataaaatatggcaatggtgaaattgtttggaaatgtgacctggtgtgtgttcatattaaggaaatgctgagatattggctcctcgatttacatacttggtaggattgagtgtactatttataccagctgtatgaatttcatgtgcttattcacctgattttaaacttttttaatgtctgcttgctgccttttcttttttaatctgatgaagtagctaaatctaaatttcgcctgagaatacaagaaaagttcaatcgtactatatatggctggagttctgtgtaagggtgatctggaattaacaaatttacattttgtatgtttaggattatgctgtctttaactagaaattaagaccagagattcgaaaaaggagatgggactctttatgccaatttcttcagtgtgtttgttgattgatgattgtaggtgaaaaccatggcataagcaatggggtccccagaattcaagctatactaatctgactccttgtaccacagtgacctgagagctttgcgggacttctttcagatatttctctatgccaaatattgaggagtgctggggtaaaaatttaaacttctccacagttcaaagaagaaaggcattcagttccccttacagatctctaggggtaacgtgtgttaccgttcaccacaaaatgttcattcctgttaacttttagtgtaaccttagtgtaataaaagtgttaacttttattatgctttatttccccgatttgatttttaaattatttttcatgattattacagaagatttaaaacatacaaaaaactaaaatcaaaagatgaccccaaagatacatagtcatcccactcaagtcatccacgtaatattgatgtagtacatttctttcctgtgcacgaggtaatctttccctaaatacttttagtcatatataatttgatatttgttttcttgtcctatcaaaagcatttctttatattcatattaacttcagttttaagtcacggcgtaacattccttgtgagtggagatatcaaaatgtattcaagcctctctcttattatcatacatttaccttgttttttagtagtcagttattaagaacaatgtttcagcacaatttttttttatttgcttaaagcattgtgctggaaatacacttgagagtgttggctcaatgatatatagtgcattttggttctgccgttctcgtttgcatgcttcaactgaattaagtgtctttaaaaatatgttttaaaaaaggaaaaggggaccattttggggtgcaaagacagaaggagcaaaatggaaatggaaccagtttaaccgtttgcctcatcttcctaacactgattctaggtaacagaacgggcaggcatctggatgtagttccctttgatgtggatgtgacttccttttaactcagtgctgataatagcgtttctttctggagaatggcttgacagcgtgcatggttcctaattttttctgccctgggagaaaaggaagagtaaggttggacctcaggttgttatcttggatggaacattcataaacctcagattattgtcgtgaatggataaatctcaggttgttatctagaatgagtaaatgtaatactaactgcagctgtctcattatgtgatggaaacttttatattatcccagccttctcaccctcaccccaagaacaaaccactctggcagaccagattctcaaagaattattttatcctagcctgcctttactttgaagtatgggttgtcatgtgtgtgcatgtgcatatgcactagcatgtgtgtgtacattttcttttttttttcttcctggtactcagagaagaaagggtccgtgagtgtaactacttttgactcaacacatttttctcccacatacaaattaaatgaagcaaaacatacttcttccttgggtgtgccaaccaaaatgactcttgatttttgctacattttaaagctaaagtttacttgcaacccagactccagacattggtatgcttaaggctctgtcttttctgaaagagataaaaacatttgcagagaaaaatttgtatgtagctcatgaaaattagtgcccatcacccctttcattccaagactggacagtaagaaacaaaacttaagcatcctttatgcttaagatcacaatattataggatcctagaagggaatcatcaatggtaggtatgactactttaaggatttgaaatattttcaagttgatgtctacatagtactactaattaatatagctgctagcagctgtatgagtatgtataaaatgataccctttcaagtgttaataaaaattattttttaaataaacaattaggtgaaacttttgtgtgattcgtttaatttgtatttgtttgaatattggtaaattttaaacatttttccacattttaaaatattttgggttttattttaaacaaattattttaacaacattttaatgtaagagtaaaataaaaaaatgtaaataagaatacaaataagaaaagtagaagtataacagattttaagaaaactagatgctaatgtatcatgagatcacaacaaaatgaatgttatcttggaaacataaaatctccccaaacctcagataaattcagaaacagcagtagactgataacctctgtcctttataatatttattgatgatgagtaacagataattaatatttagtctgattgtagtggaaggacagcatagatttgtggttaagagtatagactctggaattagagtgctaatgttcacagcctagctctgccacttactagttttgaccttggcaaataacttaaacattttttgtttcagttttctcattgtaaaagtggggatagaaatcatacttacattacaggattgttgtgtggttgaagaaaatactacagattcatcctttttaatagttccagcatgtggcaagtatgcaattaatattaggtattaaattattaataatggctaccacctattgtttgacttcagtgatttatctctttgacaatatgttattttagtcttctttaaaacacaggaatttactctctttttttaaatctaaaatattaattttttcctaatgtgctaagcactggtctagatgttgtaaacacattttcaaacaagacagaaaagaattctgcagtcaataaaattgcattctaatggaggaacaatagtaaaaaaaatttctttaatatacagtaatttcagataatatcatgagcttttgtaaaaataaaccaagaaaatgtgatgcagaatggctagtagggtcttttttcacatggtagtcagagaaggcctccctgtagaggtgacatttgaactgaaatctagaagatcataagaagtctgctaggggcttttgaggaaaaatgaaagcaaatcaaagaggtgggactgaactttggtaaacaaaaaaagtaagaggtgtggggaacacaaatttaatatgtaatggcattcagtttgaaatcactattagatagcacagtaaagataccacgtaggcagctgaaagtaaacttttggatgtctgtaaagaagccgtagctggagatagaaattgaggaattattgacataaagatgttatttaaagtcttgggactgagtaagattacttaaagacagcgtagctcaacaagggactgaggactttaggcattaagaagaggagaagatagccaagaaaccaagggaggaggaaggatgtgtatatagtcaactttcttgtctgctgttgggagggtagttgagggcataaagatttcttttaacttagtaacattgaaaaagtgtgagcttgacaatagccattggggaaagaagcctaataaaaatggtttgagaagaaaatagaatgtgaggaagtaagacaatggcattgggaaatgctggagaaaagttttcctgtaaaggggaacagaaaatagggaagtagctggagagggataacagagcaggtacatatattaagggaagagttgcagtggggaaactagagttgaaagacatagacaggataattacttgtataaagggattcttttggtgagagggaataggattgataatataaggtttagaataggtggtgagacagaggtggcacattgggtggcggaacaaaaaataagttccctcttccaatggatggttttaattttctcaataagagtatgaggcaggattaccaactgagggtgagaggaaaacaggctgtaaaagtttgaagaacaggtgaaagtatgaatagattttctgtaaagtaggataatgaaaataataagtatagtaggattgttaggcagtatttattttctacttgatgcttgcagtcaagaattgaacatgagagcagtgaacataatagtggattgttctccatccacttttaactgcttgggttcaggcaaataagatgtaaagagataagtttaagtggattagttttgcttgggcaataaagttggagtgagagaagagtagggaattaaggatgttgtgaagaagtcataatagtgtatcatggaagctgatctgagggacgtcagcataggagaatgagatgactactgaaaacaccagtgatacgctccatggattgatggtttcaggaaggtcagataattcttggaaagtggaatgttgtcagaggtaaagattggagtggtatgtttgaaataaagcttttagagatagtgcgataatcatggtaaagtcaagactataaccaagggtgatggtggctgcagtggggtggaagaacaagaattattggtggtgagatggtgagtaaaaagaggcagatgctaaatgagccaagagtctgttgaagtcactaagactggtgtaaaaaattgagtggagttgaagacatagagaattagatgttaaattctcactgaatctgggtagagggtgtggtggcaaccccctggggttggtagatgacagaagcactgagttatagggagtagaacacagaggaaatatgatgggaagatacataagaaaggacagccaggccaggtacgatgacttacgcctgtaatcccagcactttgggaggccaagtggtgtggattgtttgaactcaggagttcaagaccagcccgggcaatagggcaaaaccccatctctacaacacataccaaaattagattggtgtgctggtgtgtgcctgtaatcctagctacttgggaggctgaggcgggaggattgcttgagcctgagagatggaagctgcagtaagccatgattacaccactgcactccagcttgggcaacagagtgacgccttgtctccaaaaagaaaggggaaaaaaatgaaaagatagccttatgactatgcagacagtgattggagtgatgcatcaaccagccagaggataacaaggattgccagaacctagaagagacaacaaagaattctcccctacagatttcagagggaatatgacaaggttgacacctttactttagacttctagacttgagaatgagtgaggcagtaaatttctgttttaagccactaagtttgtgtaatttttttaatggcagcccaagaaaatgaatacaaattttgatgtgaactgcaaaggagctgggatatttgtggaaggaagaaaggaaggaaggaaagaggaaggacaaagaacgtaaggaagggagggaggaggaagcaggggaggacctcagatactttgatattaggaataaatgagactggggataactaacatttgtaagagacagtatttattaaattcaaatttttgtagttgaaggaagtaattggggttgactattcctaaatatgaagaatcctaaatatgctattaaagtcctggttctggcacttttgagctttgtgaacttaagctaatttccccatctataaaatcgagatcgtgatccttgttctgcttatcttataatgttgttgtttggaagaaataagttaagaacaaatgcaaatgtaagctgttactatcatgaagttgcttaacttccagatatgcacagtccttatatgaagggaaaagatgtttgttatcaaatatggaaaagaaccaggtagataattttttaaaacccacactaaaaattaaacacagcagttccccttcatccaatttttgctttttgtagttttaggtctgaaaatattaaatgtgaaattccagaaataaataattcataagttttaaattgcacgattttgggtaatgtgatgaaatctttcattgttccgctccttcctgcccagcccatgactcatcgctttgtccagccagggtctccacactttctaagctccctgcctgctagtcacttagtaaccatgctagttctcagatgactgtggcaatattggagtcctttgtattcaagaaacgcatattttacttaataatggctctagagtgcaacagtagtgatggagacaattcatatatgccaaagagaagcagtaaagtgcttcctcaagtgaaaatgtgaaaattctttacttaaggaaagatactgagattgctaagatctatggtaagaatgaatcttctgtccctgaagctgtgaagaaggaaaaagaaattcttgcaagttttgcagttgcaccacaggctgtaaaagttacagttcatgagaagtgctcagttacaacggaaaaagcattgaaaacaaatatatatgtagggttcaatactatctgcagtttcagacatccactgggggagtcttggaacatatccccgtggattagggtggactcctgtatacatttttcgaaagcttaagttaccaacaaaacatattattccatagttcaattttataagtaatttttaagtacttgctgtatcttgggaactatattaagtaccacttagagtctggttagaaagataaatgcatctcctctaaatgtgcttttgatacagaacagaagatgaggcaatttcaccaataattatatatcaagacagaaagtcataagtacttggggatgatggttcagaattatggtgtaagagttaaaataagcatgttataaattcacattcatgcaacttaataatttagttttacaccattatttagattatatttaataaatgataaagaaattcatataagttttgttacagtttcccttcaccttcacctcaatatccagtaatttaggggccagaaaatgaattaggtgatcattttccaaggacaggtgaaggaaggctgtcctggctgaaatgggtcaggtgtgaggcaggtgtaagtataggagctggcagagttagaattaatagggatcatcatggatctatgcactcagagcatttttttttcttgttccctacttaagaacatgtttccagtcttaaaaagatgtatccgtttcagaaatggtgaaaccaaggacatagaaaggttaaatggtttgattaaagtcagtagtgaactggaaactaaaatctatgaatatgagctcagttttacattgctgtttattcagacattaaaatacatgacatgaaaattaggaatcatagaggtatagaagtgggaagtccttcaaaagttacctcatttttcctgaccgtatgtattcactgagtttctcaataagatgtttaatattcggttcttcaaggagtccttcacatgtgtaaatgaagcaaggtatgaatggcgtctaatccacaggccagatggttgcagtggagggagctgatgagatatcatcaatcacttctctacatcatgtcaaatgaccagttttgtcctttgccggccactttggcagctgacaggacagaatctttatttgttgggaaatttggaaaaagaaataggcaaactggattaccggactggaattggttttgggattctatatcgtgttttcttttctttaaagtctgtatacatttagatgtgttataaaactgattcactggagcccttgactgaaggacatttttctttttatttctactttataatgataatgatgtcattgtcaagaaaaccagttcatattgaggactgaaaaaatataatgacaaggatatgatctaaggttaattttatattagtctaacccttgctccctttgcatctttagtcctgtataattttgaattaattatgctacaggagcaaatagttagaggtgcatattgggtaattataatttgcactacagtgttcaaaacaaagcaattctagtctagttctcagttaatctgaaagtgaaataaatccagaatctatgaaattctttattttatcaattctaaaatagtatacttccataaaaacatatattgggcttaaaataaatataattttaggtttggtaactttaattgtgtaagtcaactttcctggagaaattagattacattgactatgcaggtgcccttgctattactcaagatcagtagtgccttttaatacccatggcaactgatttggattgatatggaattttgagtacaaactgtaagggagtaataactttcagtaggttcttagttggaacatacccctattatgaaagatggattaacaagagaaaagtaaacaagctgattaacatatatatttcacaagtacatgggagatacccagagaatgagtagttttcccagaagtggttttgaaatagctccttcaacaaagaacagtacatttttagagaactgaaaagacaaaggatggcaacttgaggagaaggcaaatgcatggcagacaaaagttagtaaaacttgttaatataaattcctctggtactgttgctaggctgataagggtctaaagctgtctttggtggttaaccttttttctttttggtagagaggtgggcaggataccattttctttgtaaatctatctactgcttttaggcaaataaagggaggccagagaactctcctgtgtttcttcttaactgccttcagtgcaataacccttcatattttgggaaggtatattctggtctcccacacttccattatgattaagatattgtcactgaaatgttatgattaccttgccacccagtggatcctgtataatcatttctgaattattccattgttttaataatgacatctttaaatgtgtttgatttccatcatgatagtacatgcatatcataaacatttaaaaataaacaaacaactttgtggaatagtggttctattcctcccagtgatatgatggtaaactagtaaatgggagttaggggagggatggtgcagagaagggacatcctgatgtgtagcccttcctgattaccctggggtaaatacagcctctgttgctgattttaagccctccctaagaatagggagttggaaatagatgttagctatcctctctccagtgcccactgggtctagctttcacctcacccctctccatcttctcctatttccctttctagaagcaacactttagctgtttctcttaattcatttgctagtaaaattcaaatttttattcagccgtcagatttttggacagttaaaatgttgttgttggccatttgcctagcagtcttggaaaggcagctttttaaaaggctgcctaaagtttgaattaacattttaaaactctagatatttggatttcttagttcctctagtatagtttgaagtaatttaaaattaccaaacaatgggcctgaatgtgaaaaaagatgaattgtaagacagtatcaagaaagattttctaaggaatagttttaaaaagatactgttgatattaaacatacttatatgttaatatataattaacttaataaccaaggacatttacttagcgttgtccatgttagatattgatttgctagaccaacatgttttgaccatttcaagattctggttatgacaaaaactcaaatttggaattgatagacagaactgatccataaattgtgagaaacaccatttacatacgtttctaaaaattttcacatgcttcatccagctctataacctgcattttagggggttatcattcattcggattaaaacttttaaaaataaatatgtattatattcagtaaaacaaattttaaagcaaaagaaatcggagctatttcattctttgtgatattgttaaatatagattgtttctagttttcaagttttaattttgcttcgtagtaaataagagatgtattatcaagccttttcttacttaaatcttaacaagtgtgtaaatagtatgaatgttgctcacaacccacactgtttgtaattaagtggcaaacttattaatttccatcacagaagtctcccattaagtcaaattctcttctgtgccagcccagtaaccttaattacgatgcaatatttatcatcctttggaataatgtttatatctttgagtaagtctaagtgttaggaaggtttaaagaaagcgtggaactatgtagtgttgggaggtacctctttctaaacacctggaagttattgcagttatttagattgaaatgaaaaataatagctgtttgttttctagtggtatgctccatttaagaaaagtcttaaaaggtagattgttttgtttagtatgctcctttaggaaaatattctgtgtctaaaataataaagaaatctcattagaatctgaatgttactaatttgatgaaattacctcttattatatagcaacatacccctgcttttaatttattttcagtcttaatctttaaaatgacagagaaagtgtaggaagcattgtattaaagtgatggtgataatttacatatctttgagatgaataacatttcaatggaaacagcaaacttaatgattaaagaattacttgacatgtgggcatcctgtaatctttcctatggaaattaaagaaaaccagttttacccagtaaatccaaaacactgaacttctgacctcttatgcctctctggtctatattatttatgcatcttctaattcttgctcttatgctactttcaagtatggtttcttatcagaagtaggctcgtaggcaatgtaaagtcatggataattcaaagtattcaggagcctcattgtagtgatatttttgtatgagtgtggtgatgtcatagagttaggagacttggttctaatcttgactcagtctttaatatggattgttcttttacttcactaggcgcatctgtaaatagaggtcccttgtggctcttacactctaaggagatacaattcaatttattgcaagtctctatatttatgccttatataagttcctggagatactgagaagggtaatagccagtcatcatactcagtaagctgaaaggctagtggggcagacaggcatataagcagagaattttagactatgtggatttcaattggaatacaagaatttgagggtttaataatatatgtaaactattttataaattgataaatattaaacccagaatttctattttaatggaagtagcattacctgacatttctgaatggtaaatgtatttttgataccagagcatctgtgatttttttacaattaaagaaaaatcttagctttttagacaagatgtgtgaacttaattcaaatccaacaattaattgaaaggcactggagacatgctgtatttcactgtcagttttttgttattgttgctgcttatatgtcatttgtaagatgacaccattattcaagtgatgagccaaacagtactaaatatttttttctaagccagttttctatcccaacttttattttctgtgcatactattccccttataatcacaaattgttaatatgggaggtgtatttacttttctgtctctttacaacctatactcattgttatcaagtcctgctagagcttccttaacaatatttctgaggtttgtctctttcttttcatttgaagtaacactatataagcaatgtgtaccaggaagtttggtatatattgtggcttaatcagcatataatagacttttctttaatctgacttatttcaggtcttgtttctgtagctgcaccagcgcaaaattgatttcagtatttacagtgaatatgcagcaatcgttgagttactacattaaaatgaaactaatattagctgcccatagaagaagtacagagtagtgaataacagtccataatctgaagccaaaatatgtgggttaagaatctctgttacttcctggggaagttactcaatctccttgtgatttagttttctcatctgtacttgaaaaacacttgaaggggtgcctggcatactgtaagctctcattcaacatcaggtattaccaaatagtcatctgatataagaacattaaaaaatgttcttatatcattttttaatataatttttttcgaataaaagacattataaaattttgataaaaagttgctaaactgtcttattgttgaagtatatattagactgagaacacatccagaaatcaagttagaatattaatagagatagggtgttttgcatggtgtatcttgggagcacagaaatgtgttatctactgcggcttgataggagggagggatttaacagactggttggaagtgtggattttggggagggagttgtgtgcatgggagattttcaaaaaacagtttgcaaaggagcattggatatattttattcacatcattatgctatattgtaaaaaaattatgtcagttaaaatggagaaacctattagcagtcaatgaatggagatgaaaatgaattactttttttgtgctggcacaataaaatttccattgatcattctttgaaatgagtaagttttggtttaggatttttgacatttgatggatttcaagaaaaatacttaagctgatgtgatttcccacttatcttttaagtacataagccaaatgcttttattttgaagtttccatgcaccctggttttgaatattttgccttgttgattggactatcagtccttcccatacctagttgaccaccagaatcaccttgggcactgtaaaaaccaggtgttggggtataacatgggaaaaattgctaaaagcggcttaaagaagacagaactttatttattcctcatgtaaaagaagtccagagatagatactagagtgcgtatagcacctttttgttgtcaacaggtttctgtctttccattctgatatcctcaagttcacctctctgttgaagttagcagctagagctccaaaagcagagaagaacaggaaaaacaaggtatacctctccctttaatgagactccttaaaagatacacacttctaaatgcatattatttcctggtacttagctgaatggcttgtcaaagcctgggaattatagtctgtagctgagaactatggctcccaaaatgtaataggggtttgctactaagaaggaaggatggagtgcatactgaggcaggagagctgcaaagtctgccacagacatttgttaaactgattgattcccaaggcctatccatgtataattgatagatgtgtagggaaatctgagatattctgatgcagctgatttattcaggagtatctgtgataagttaactttttctactttaaagcccatggtcccatgaccacgtatcaatctctaatacatttacctaagattcctatataaaagtgagtaaagaaattacgtattgccattttgaaaatttttctgtattgtttgtccaggtgctctataaaattaagccatgtgaaggagtggccactagagtatgatactcttactggaattctgcatacactcaaggtgggacactagggaatagatgtacattttgtattgggggttccaagaccacctccaggcacaattgatttactataaataccctcaggatatagaagttgttgtattcatggttatagtttattatggtgaaagaataaattaaaagaaacaaagggaaaaggcgcatttgtcaaagttcagaggaagtcacccacaagctttcagttgtcctctcccaatggagttacatggcacacatttaattcttccagcaaatgatgtgtgacaacatgtgaagagttgccaataagggaagctcacccaaaccttagtatccagggtttttaattgcgtgttagtcatgtatacatatagtgctgtgtgactgacttcagttattcaaggttcagaccaccagagaaaaagcagatactcatcattaatcacactgttaatgtaaactagccaactgttacaacgtggcccaaggcctttggcattaaaaaaaaaaacaaaacaaaacactcttgtctgacagaatagtcacagcttggttcctaggagtgagctgagggccacttcttctgaaaacaagcctttcttgggaatgcttagtgtattagtctgttctcacgctgctgattaagacatacctgaaactggataatttataaaggaaagaggtttgatggattcagagttccacatggctggggtggcttcacaatcatgttggaaggcaaaggaggagcaaaggcacatcttacatggtggcaggcaagaaagcttatgcagaggaaccaccatgtagaaaaccatcagatctcatgagacgtattcactaccatgaaaacagtgtggggaaacctccctgatgattcagttaccttcacctagccccacccgtgtgacatggggattattacagttcaaggtgggtttggttggggacacagtcaaaccatattgctcaggatttgagcaactcaggcctatcaggttctttcctgtacacatttccacctgaaacaataaaaaagaaacaaaatatatgaaacaattatttttaagatactggctatcaagcaatgaaatacagtgttccctgagaaacataaacaaatgaaggaaaccctaatatttttctagtttatcctcttgagagagtttataggctgcagatcagaagggggaaaccacacaaagcctggtggaatccttcaattggagagacagagctgaaagtctagggagaccaaggaagctagagtttgtagaacagaacaacagagaggctagagctgctcagagagaaacctgcagatcagcagagggttccccttgagtactccacagagtaatgattagtatacgcatgtgggaaaatgacccatggctgcgtaaagaacagtccgacggaactagcactcacatgggtctgggaataatgcctcctcccaccagccagactggaaaacttcatgattcatacgacattgggtattcagaagttttttgcctcagtagtgggaaataattagccccagagcaaatgctgcttgattccctcctcacaaagcttaaaaccaagacctgagaggatcaaatcattttcaaataattcaattatgtcctagaacaaaactcaaaaacatttataggaatgcgaaaatatcatgtacccaatatggtaaaattcacaatgtctatcatccaattaaaaataactaggcatgaaaggatgcaggaaaataccacccataatgaggataaaaattaatgtattgagacaaatccaaagccgacacagatgttaaattagcagagaagaacattaaaactgtcattataactgtattctatatgttcaaaaaatgaagtagaggtgtgcaaaatagataggagacccaaattgaacttctaaagatggcaactgtaaggagatgaaaaacacactggataatattgaagacagattagacactgcagaagaaaagatagttaacttgaggacatagcaataaaaactctaaaatgaaacacagagagagaaaaaaatgaaaagactatcagtgagctgtggaacaacttcgagtggcctcatatacatgtaaatggaatttccccagagatgagagtgaagcagtgggaggagagaagaagaaaatatttgtaaaaatgaatttgtaaatccaagaagcccagtgaaacctaagcagaagaaatataaagaaaacaacgccgaggcacatcataatcaaattggtcaaaactagtgataaagagtttatcttcagagcggctagaggaaaaaaacaggtgtactggatacagaagaacaaagataaagcaatagcagatttattgttggaaataatgcaagtgagaagacatttaaagtatcagggaacaaaaactttcagtgtagaattctattatccagtgaaattagagttcaaaaaccagggcaaagtagagactttttcaggcatacaaaagttgcaaacatttataagcagcagacccgcattacaagaaatattaaaggaaatcacatccttcaggcaaaaggaaacaatagtaggtaaaaataggggtttgcaccaaggattacataattgcaaaaatggtaactacataggtagatatatgatttttacttactatttaaacctcattaagagaattggtcatttaaattaaacagtaaagtatggggtttataacacatatacaagtaaaatgctatatgaataatctttgaagacattatgctaagtgaaagaaaccatttacaaaaaaacaacatattgtatgattccatttatatgacatgtccaaaacagacaaatccaaagagttagaaagtagattaatggtgcttaaatctggaggtttggggaaaactggaagtgactgataatgggtacatgtttttggcagggatatgtttgatgaaatgttttaaaattgactatggtgatggttgcacagctttgtaggtatactaaaattcatgaattatatacttaaaataggtgaatcatgtgtaagtgaattatatctcaataaagctattgtaaaaaagtaatactttacctatgaagaaaaaaataaagtcacttaaatatgagacggggagaagtaaaacctaacaatgcacaaagaatgttgggtaacatgcacatcatcggtgagacttgacaagagcatttgcagtagtggtaggaaagtgaagactcagtgggtagctgaatgtttctctttttcactttaaattggagatatgtatgcattcttctgtgatctgttcatgcccttttccagcttatctgataatattttcctgttttcttatccatttatgtgagctttatataagagactaacactatgtcatttttgattaatttgattgatatagttcaatgagtgtttggaacaggatttctaaataggacgtgaaatcaaatgttaatctctaagagtccattccaactctaatatactaaatcctagggacccaaaaaagatgccaagttaattttattaatccctggaaagaagctagattaggtcaaatagtatgtaattacagtgtaagattgggtgttatatttttatatcttgctttaggtataaacttaaattattttaagtgagatatttgttctcttaaattggaattcctaggttgtttttggtaaaaaaattgggatatcttgatgtgactccatactgcatatacagctaatactactgtttaaatggaaagcattctctctaggcattgaaacaaagtgtattaattaagaatacaaaatattacttattaaggaaataaaagtagcttaaatagtaattgtatgcatgaactttaaattcataaatttcatgattttaaatagtccaactcctcaactcacccaattccccaactcctcagctccttgctctactctgatccttctcaaaaaatagatatgataatccttcaattaataaaatccagaaatgaaaactcatttttatcatatcagttcttatttttaacataagtcacttgccagcccatatatatatttccttttagctgttaaccatatagatgaagggcaactagtcacgctatgatttattacagttttgtgaacctgaaaatcatgctacttcctctatttacttaatttgtaaaacatttaaactcagttagcccaggtcctgctttcatctttcccttgaagtcctgttttccagcatctctatttgttgactggtattaaataattttagcatgctggtatacacttagcctcttttgaactaaaataacccttggtcttgtgagcagtgtcttttgtaaatgagagtattttatacacaaaaggtactagattaaaggtaaatcataatacttttcatactacttgaaaaaggccctctaaggccaattttacataggagccaggcaatttctgtaaagcaagttttgaggtaaattgactaatttgttttgaatgaaaaaaagtataaatgctaaaatatagattttcttacccaatgaactggtgaatttttttggtaacgtaataatccctatcaactttcttttcacataattctgtcttgggattttgtataaatttatacatatgttcaactttttgcaaatgcaagatattccaacgtgtattttcatagttacacattttctacatactggttttaatttaaatatgtaatatatggatgctttgccacattatattaaattgaaaatagtttataattaaagtaatgaaattttaaaataaagtacagtataggttatcccattttatatatttttgatatctctttataagtgtttgcatttgacactttatttctcaattcctataataaaaatatacaaacagtatatataaagtatatatgttattaatgttttgctgtttaaattgtttaaagaataaagatatataattaatagctagtgttacattatttggtaatattgttttcttttcttttcttaaattaagcaatactttaaaatatctcctttggttattctgaagtttcttcttgataaaataaaatggtacagtcaacatggtaccatttgaactcttaggctaaaggtgactttaagttgatgcccaatattaatagtatttgcatacttccacaggtggtggaatcctttccttgtctgttatgaactgtttatgtcccctcaaaattcatatgttgaagacttaacttccaatgtgtggtatttgaagatggagcctttagaaggtagctaggggtagatgaggtcatgagggtgggaccctcatagtgggattagtgcttcttataagaaaagactacagagagctttctctcattctcatcctctctctctgcaacatgatcacactgcaaaaaggtggctgtgagtgagtcagaagagggaaaaggattcttacctggaaccaaattgtcaggcaccttgatcttagactttccagcctctctaactgtgagaaataaagatctgttgtttaagccacccagcttatggaattctgttataaaagcctgaacagactaaattgtctatgtcagaattagtcactacctttggcatgctctgttctgtattaagaattgtgaggttaatatcagatgttattattcttgtgtttgaattgtcaatcttttctgaaagacaataaaaagactttttttttcacatagagatcatttaggcacctgttgtgtggtgtgtattttagaagtgaaggagagtcacacactgggccttgcaaagacagacgaagagcttcctctggctcaccttaccttgttgagtgtgagagtgacataatagacatgatattttaaaatgtgtaaactatttgtgttaactatatgctcagtagaaatgaatcaaatattccaggcgatatgatgagcattctgaagggattcatttattttcagttgataacattttttgatgttttacaaattcatcatttttcatctgacatgcccttcctgggaaggaaatgtaatgtaaatttacctaaacatgttgggaccaaagacccatgagttatatacagttctatggattataaaatgatatctccattgctatatatatatatatatatatatatatatatatgcgatggatattaaaatctgtttttgaatttcatgacccttccacactgccatattaatttgcaaaaagcatattgtattttcaggcagtctgcctttgaaattgcagggcttagggcaatgataagttcagagacccatgactcagtcagtgatttggtttcctctgagatacatctctattttttgtactaccttatttatagatattttctcacctgttgtcttcatcctttttctatattcctgtacttaaaaatatgattcccatgtatacattcagaattgacaatataggaatatgagtatacattgggttaatagtggctaaaacctagttctattacatacatagataacatgtggtaagcacttactgcatgcaccactctaaacatcttttgcattatcttatttaatcatcacaacaaccctatggggtaagtactattactaatcaccattttacagttgaaggagtagagagcttgagagtttaaataaccaacaagaatagtagagctaagatagaaacccaaatttaatctcaaacactatgcatattgcttagtgaatacttaacaaaatgaaagttgtaagatttaggactatcagagattctttccttcataaatttttaatcaactgcagtgagttacccactgtgcataaagggaaaattggcctttgtacagagctagtaaaatgggaaaaaaagtatgataagttacttggaaaagtagaacaacctaggggcttagaaacctgtgtctgggcaaagaatggaagtacatttaaaaaattattaggtaaatgtaagtctttgaccaggactgattaccatgggtttctgaaattttcagactctaaggttgattgtatctcaagtgtgaacctaggatgcaaaataaagctgcattctctcctcttctgttccctacctagcaggagatgggccgtatcagttctgagcttattcaagaaccaaagatacctttgtgaatttctgagatattaattaaatcactctacactatgactaatgagagacatggagaagcgtgggataactggctgagactggggcttttaaacaagagactgttaagcaaataaactgaaaaatttagttctccactgaccagccttagttagattgttacctggataaggcaacaaatactcgtcaaaagcattaatcaatagatatttctgtttttctgttagctgagaatatttattgataaaaaattggcaccacagcacaatgttatattgaaatcaaagtatttctgtccaattatgaaagaaatgggaaaaacatgtttattattattattatttgtttacttgatgcattggaaagtaggagataacttatagagaactcagaataagccattaaagaaaaatgtaagcataatttaaataagacaaaacttagtttatcatcttaagcatgtaagtacaaaatgtcagcaacatgtgtatcattttaatggctcagaattatagcaagtaattaccagtattgaataggaaaaatttgtttataagttcgaatgcaaagggtaaaggaagcttaatggtacactatgtttggataattactattgtgatataaaacaataccacatgttaagaaagaggacatgttggtcaagtagcttcctgcaattggaattcaagctcttgaataatactgaagctccaatgttttaggcctaagatttagtgattttgtttgtgacatgagggcctgtgattgtaatcaatacaggcttctcttttttgccctcaatggtaatacagaaaaactctctttagatgtataattctagtttgtatgtttccgcattccactgcttcacagaatagtgttaacagaccaaacggtgacaatatataactcttatttgatttcatttatacttggccctggataatattccatcatttcttaaactaggtaaaattagtacaattaaattttttctaatttttttttctgcgtctggaataaccagtgtatctttattgtgttactgaaaatgtttggtaaagccaaacaagtcaaattctttgatgagagaaaaatctccctgtataagtaatgtaccctgtatctgaaagggttaatgggcttcttaaagtgctcaattcatccagagaggggactctgtgacctgttggaacgtgcctttggccatttcttaggaaaaatgcaatttagaactctcctgtattatctgtcagctgcttagttattgatgatattgacttttagttttttaaagtcttgctttggaaaattatttttaacagctctgaaccactcatgtcttgtatttttattttatatcacatttcatttgggatattattaagccaaatccttggtaaccattttgcacaatccaatttatttttacccaagatccattgaattcaactcactgcctttttgcaaaaggttaacccaatatttcatgttatgttatgctttctacttatgctatgtgaaagaaaagtagctgtgataagtagccaataaattacattcagaatgtttattctcaaaagttatattgctatgctgacatagataaacatgatcatttatcacaatatggattatggaaataaaaactaaaataaatgcagccatctttcttgcatgttacctggctggtttgctttaaatgttagaataactactttaaaaaaatgtgtctttttatttctcaatttgaattaatggatgagattagtaatggttgaaaactgaatagataagcaaacattatattctggaataagaaaatgttttcactttttttctataagcatgagattacttgaatcttctaatactggctttgtaaaataggtcctgttagtattatttcatcataaggaatacaccacttaaaattaaagctttattgtatatttttcttcaaaaagacacagatgtctaacttgagagactgaagaaatatgatttctgtaatatttaggagttactaaaaataatcttgttacatttatattgagctaataaaggaagttttagtggtattacagtgaataaagtatatggctaaatcgactgaatgtagaatttaatagggttttactttggtaacagctttattgatatacagttcacaaatcaacaattaaccaatgtaaattatagaattcaaagtattttttagtgtattcagagttgtgccaatataaccataatcaggtttcttcacccaaaaagaaatcacttatcctttttatagtagccatctcatttctccctaatccgccagcctgagcaaccactaatatactttttatctctatagatttgcttattctggacattttatataaatggtatcaacaatatgtcatatttgtagttgacatctttcacttagcataatgtttacagtattcatcatattgtttttgaattttccaaatttctttctgttattgatatctaattctattccattgaagagggagaactattttgtatgatttaatatttttaagttagtagaagttgttttttcatctagcatacaatatatcctagagaagattccatatagagttgagaagaatgtgtattttgctcttttagagtgttatatggatgtctgttaggtcttgttgatttatagttgttattcaagtcttctgtttcctttttggtcttctgcctagttgttctatccactgtttaatgtggagtattgaagtctttaattagtattgtttaaagatttgtttcctttcaaatttgtttgtattttgggccttgttgttaggcacatatatgtttataattgttatattttcctggtagattgagcctttatgatgataaaatgttcctctttatttctagtaaatttttttgtttctttaaaagtttgttgttctgatattagtatgggcactgcagctttcatgctgctgctatttgcatgatatgtcattttccatcttttactttcaacatatttgtgtcattgaatttaaagtgtgtctcctaaagacagaacatagttgcatcttgctttttatctagtctgacagtatacatttatactattataatttcataattacctatactttactgttgacctttgtttttttcgtgtgaatagtaagttatggttacttactttctgcctgaagaacttcctttaattttatttttttcactttttattttcatttttatttatctatttattttgagacagagtttcactcttgttgcctaggctggagtgcagtggcgtgatctcggctcattgtaacctccacctctggagttcaagtgattctcctgcctcagccttctgagtagctgggattacaggcacccacgaccatgcctggctaatttttgtatttttagtagagacagggtttcaccatgttggccaggctggtcttgaactcctgaccttggtgatccacctgccttggactcccaaagtgttgggattacaggcgggagccatcatgcctggccaagaacttcctttagtaattcttataagtcacatctgctaataacaaattctcttattgtttgttattctgggaatgtattttttgaaagatagttttgttgggtataggagtcatggttcacatttttttttcttttaatactttgtatgtcttatcccacttctctctggtctctctggttgttaatgagaaattcactgttaaacttattgaaactatttttacatgatgaattattttttttttgctacattcaagattttctttttgctattgactttcagcccttttactgatgttctttgtgtggatctctttacatttagcatacttcacattcattgagcttcctgaaggtatagtgtaatataccttgttctactttattaaaaaaaaaataaatcgggcaaattttaagccagtgtaacttctgtattttctcctgctttgtcttttctttttcaggtaatcccattacagtattttggtttgctcagtggtgtatcacatatcattgaggctctgttaatttttctttattctttttctctttggtcttctgattgtgtaatctctcttgatctgtctttaagtttgctgattctttcttctgctagttcaaatctactattgaactctagtgaatgtttcatatcagctattgtatttttcaagaccagaatgcctgcttgttgtttttgttaaaataatttaagtgatttatatctgtatatggatattctgtactctctaagacattgtcatcatactttccttgtaatggctgctttgaagtgtgtattagttctcatgctgctgtaaagaactgcccgagactgggcaatttataaaggaaagtggtttaactgactcacagttgtgcatgtctggggaggcgtgagggaacttacaatcatggcagaaggggaagcaaacacatccttcttcacatgacagcaggaagaagtgcttagcaaagacggaaaagtcacttataaaaccatcacatatcgtgagaactcactcactatcatgagaacagcagcatgggggtaactggccccatgattcaattatctcccaccgggtccctcccatgaccacatggggattatgggaactacaattcaagatgagatttgggtggggatgcagctaaaccatatcaaagtgttaaatttgacacatgggccctcttaatgggagtttctgttgtctcctttttttgtgtgtctgtatggatcacacaattctgtttctttgcatggctcatacttttttaaattgaagactgaacatcttacataatgtagctattcttgccggacactaaaccccctctagaggagggcgacttgttactagcgactggatatacttttttttttttttttttttttttttaatgcagagtctcactttgtcacccaggctggagtaaagtggcatggtcacagctcactgcatccttgacctcccaggctcaagcgatcctcctgcttcagccttctgagtagctgagaccacaggcatatgccaccatgcccggctaatttttgtattttttatagagatggggattcactgtgttgcccaggctggtcttgaattcctcaagcagtccacttgcctcagcctcccaaagtgctggcattacagacatgacccattatgcctggcctggatatactatttagggatgtacattttcctctgtgtgaaccgctgatgtcattctcacagggtgcagccttggatatgtgcagtcattcttgggtgtccctggttttatcaggtgtctctttgcctttttctctgatctctctcttaagatgtctgcctgtagtaatgtcacacccagatcttagttccagtggcttctggttgatttctttattacttttgctgtggaatatgagttgttccacagtgtgattcagttaaatttgggccttttttcagtggtagtttttgaggtgagtccttgaggttttttgtaactccaggagaactcatcttatgtttctttccctgggtttcccttatgaactacctgccttatggttcagttttttgttttcaggaagctacctccctcttcttaattgtttgacatgaacatttttattgtttataagagtactcttaggtttgaacttccctgcatacaggttcaaataaagtcagttcctttggggggacctctctgttcttatggcttgtgtcttctgggaaaaatctctgggccactgctccagagctgaggatagtgacaatggcccacttctctcagagttaaatttctgctttatgagcaaagtactaggtataggcaatagcctctagtcctctcagcttgctcttccttgtgtgcaatctctacccagtaagtgaggtgaggcaaggataatcagggccctggtgttattggcatgatattcctgaggtagaaccttggctctatgagtgggggctggatggagtaacagaactcctgacctgtcagctgcactttagtctcagctgcactcagttgcagttttgtctctgtgtagcatgggggagagagaaaatgagaaatgctggcatcttacccctctctgggagataccatagccctcaactggtggctggggtagagcgagctctgtgttttgagctatacccatctgaggtagaatgactgtcacactggactgaagtggtgtgggttatacttcaaatgccatagaccttcactccttttaccagttttagcagattttcatgtattattgtttcttcatttgctgtttgccttaaggcaaatttccagagacttcaaagagttttcatttttactatttttgcagttatatgtttatttttatgggagtcagtctgcagaggtccttactctaccattccagaggtgacctcttaatggtcatgtttactggcttgctcaagacagggtttgaaattaatttttcattgagctactcaggtgcaaattgatattatttaaacatgtggttaaaaatgtttcctaccttatatctcaaaaagtgacttttaaatatagccctcatctttggatcaggttcaatataagtcccatactcagaaaaacagagttccaattcaattctttttgcatattaactgtgagatcttaagcaggttacttaatcaccctcaatttatttgctcatcctaagtattgagagagtagtagctgtttgtaagttaagttacataatggatgtgaaagcttttgaacttttaaactctaaaaacttaaaacacaaagcattgttattaccactttaaatcaaatgcagaatgaaatgaagtgactttttctgattttattcttgtctaagaatactaagtataacatttattttagaaagtcatttatgatttttaaattcttcatattagcatgtgatactcttataaaatcagctaagatatcacctagaaaatgattactttagatatgttgattgtggaattacattagtagaggtggaaaataacatttttagcttgtgtctgttgttaatagtataataattcttttatctgttcatttattgtggtctttttgatagttctctgtggatctcaataagagttcatttttatatgtgaaaatgatgaacatgacccaataatttttaaagaatcatggaatctagatttggaaggtgatcttggatttggttaaatctagtaggaattgcattctcaggtccccttcaaattcttacttggccactacatgaacaaatcatggacagaggattactgttgcacatagcctctggattccattttcactacacttcaatttttagggtttttgtagtttagaaaacatgttgtatcatgcatttcatttattctttacttctgattcaggtgttgccctattttgcatgtgaggaaatcaaagatcaaaaagatcaatggtttactcaaagttataagagtactaggaattaaaaattatatttatgatttttgaattactattttacaggaataagcatatgctacctacctggtactgtatatcataaactgaaagatttttgaaaagtcaggaatcccgcaactcaacacattcacagtttagaagggaagaaaattcttaaagcagcagttactgtttagactgaaatactgtggtagagatgtttcagtgatctgaaacagaaaaatggatctagattagttaggggtaacttcatggaagaagacttttgaaatgaacatcatttaaaatgactgcagtaatgtcagctggaatgatttctaatacaatctcagctgccactttttaatttatatctgaatccaaatcttcctccattaatttccacagccttggttctgtgttaatacaaaacaaattaaatctctcttccatgtgaaagttcttcacctactgaaatacactgtgtctctcccagatcttttctccaggcttttcttcagctgttgcatctaacttttcaacacataatcattattgaaagatggtaggtaataatgttaatttggttagacagaagcatgtgctactaccatgtttcctcctctctggtgaaataatggtatgttgttcattattgattatatttatttgtttttcttgaagtttttcttctggtcaagaattgcttctggctaattagtagaaaatacaataacaattactcgatttatattttgccccatattagtctattaatgtaagctgtttgagagccatgcaacattttaaacatatattttagctttttgtcaatgtataatgatatacattgatataatgatgtcattatatcaatgataacattattagattttttctaagacaagtatatcttctcactttttccatataaattttcattgtattaggattttcccatactgaacttttttttggaaaaccaaatataggattcctcacttgattttattaaacacaatcttgcaaatttggggtcattcttctgatttacatgtatctttttttttttgtgattcctaagttttctttcctggctaaccctttctttaggggcctgtaagaggaaatcttagataaagtttgattcctaaaaatgctaccagacatggtggctcacacctgtaaccccagcactttgggaggttgagccaggtggatcgcttgagaccaggagttcaagaccagcctgggcaacatggcgaaacctcatctctattaaaaatataaaaattagccaggtgtggtagcgtacgcctgtagtccgagctacttgggagactaaggtgggaggatcgcctgagcctggaaggcagaggttgcagtgaactgagattgtaccactgcactccagcctgggtgacaaagtgagagagaccgtgtctcaaaataaataaaaataaaataaaaataagtttaaacaaatgccaacatatttccatatatttacacattgtttatgctgtctttagagtatcctggctttaaatcctcgaacacaaactcatgcaactctgcgttccacttcggccaagaaattagacaagaaacattggaaaagaaatcctgataagaactgctttgtaagtaccactgatacactatttcatgctgaaaattacctcactccacacattgtaaggcaagattttacatacacttagaaataaggtattaaagtacagccgtgattttaaaaatattttaaatatttaatatttgaaaaagtttgaaagtgtatttttaattacactgctttaaaaaatctcctgaaatacaaattatatacaggttgagtaacccaaatctgaaaattcataatacccaaatctgaaacaaatctgttgtcaagcatttttgataagggatatgcaacctgtaaatttagtttggtgccaaaatttcttttttcaaaatctttaaaatttgttttaaaattgttttgcctaatgacacaatgatacagaagagttttcatgttaaagatatagtctaaatgaagaaagctatagatacactggtatctgtggactttaaaaatacaccctcacaaaatatatgaacattagatgttctatgaacacctaatatttccaggtgaggtgtaggagcaaaacagcatttctctgagattattgctagaactttgtttaactgtatataggaggtgattatagagctgaaactgacaccatagatcggatataagtacaaccttaaaggtgatgttagaaattccatcttaaagttatatacgtttttaaattttgaaagaaatgtctttttatctgatttccccagattaccccaaattaacattcccaaattaatgagtgagacagtagtattagtttaacattagctcaattggaaccgtgtatatactttcttatagaatgtatgattttagtttatgtacttctttcctccttcttatattatgaactctttgaggatggaaactgagggtgtgtgctcatgtgtgcttgtatttatctaattttaagtttttctatcaccagccactgggcaattttttttgaatgaaaaaagaaaaagaaacagagaaacaatgttacatgaaaagatcccatagtcacttaattacagacatggattttgaattcagtttttcttgttccagttttgggagctttgttttctatcatgatgcttctagtagaggtctctaaaaggaaaccagtgtgattcagattgttcaaggaataggccacttacaagccatgacgcagtttaatgataagagcaattgaataacactgaaaaaagaatcatataatttttttattatagttttttttcttttttttattattattatactttaagttttagggtacatgtgcacaatgtgcaggttagttacatatgtatacatgtgccatgtgctggtgtgctgcacccattaactcgtcatttagcattaggtatatctcctaatgctatccctccaccccccaccccacaacagtccccagagtgtgatataatttttaaacttagaaagcccttaaagactatcaagcctaaatctctaatttttaaaggtctgagaactatgatcaagagacactatgtgacttccctaatgtctcgcatttataagttttcaaagtatttatggtcaggactttatttcgaaatggagactttctttattttgattgctgttgttgttattttatggaaattagcatttgtatctcataatgtgatcctataaattgagtttattttatcattttaaaaataataaccaaggtacagtgaggtccactttctctgtcaaatatatattgacccaaatatttataaaagcagtttgacaatatctttgacaatattcatttggacctgtgatgctatacctagggatgctatttatacctacggatgctacaagaagataccacagactaggtggcttaaacaacagagacttattttctcacagttctggaggttaggagtcccagatcaaggtgatttcttccaagacctctctccttggcttgtagatggtgtcttctccctgagtttttcactttgggtgtgcgtgtgtccaaataaggacatcggctatattggattaggacataccctaataacctcattttaacttaattacctctttaaagactctctctccaaatatagctacattttgagatagtgggggttaggacttcaacataagatttttgaggagatatagttcagttcataacaatactttaaaattatcaaacacttgcaccagtaatttattttctaataacatatctgaaggaaagaattaggaatatagataaagaattaagcacaaagaggattatcttaggcattatttactcaatggagacaaatgtaggggaaatcccactgaattccaaccagtgggtcatggttaagcaaattagagtaaattaattcagtggtatattgtgcagtcattaagatgtttttgaaataataatctggataaattctatctgcattacatggaaaaaggatttaacatcactgtattcaatagtgattgtgtacacttacacataaccatacctttatatatatatgcacaaaagaacaaaaaaatgaaatattaatattgattatattttttggcacttttgtatatttcaggtcttctgtaatgagtattagtagaaaaataaaatgaaagctttagatctatgttaaaatagtaatctcgatttataagatcagatttattgcactgatgtctgttagtttgaagactctctgtgacattcatgaatttctcagagcagtaaggtttattcccaaaagtgaaatatgaagctagggttgaaagttattctcggtgtggttgaataatgctgctccttacgtatttgttattatcctcttcatgctggcataaataattgaatgaaagtgtcaccaaaacatatggtttgtttttcaattcataaagacccaagtaggatgctggaacttttatccccactagctagccagtaaccagtaactgatgagatacgaaaaagttttcttcttacctcactgacatctccttcttgtttttcttcacttctttgttgattatttctcctctcatccctagatatttcagtgcccagagctcaaactctctttctttcttttaaaatagtcactacattggttatctcgttatctccttacttttaatactatctttagattgaagattcctttatatttctagcctgcattactgtctctctatctatatattgatatatatacatatatctctctctatatatagatatctatctatatataggctatatgtttcttatgttcacttacccaaaacagagttataattggactcaacaattatagaagtttttcttgaggcattatatagtcctctcttactatctgccttcttcttccttttttctatttctttggtgctcgaagcatcttatttcaggcactgtattgaatgctactcagaggtgaataaaatctagcaaaataagtagtctaaaatcgtttattaaaatagatacaaattttgtttaataagtaaatcataggcttcttagaaaataagcatgtgtttgaccggtaaaagtgccttaagaatggcagttctgaaattattgcccaggaatatcttcacttggtagtttaatattcttctagtactaattggaaattctgacttcagtaggggatttaaactggcaaacatgtttatactggttaatgaagcatgaagcagttatttccagtatattttaagcaggtgttccataactgctgtttatttttgccatttttgaaaatgttgaactatcctaattacataaatattttgcactcatttttcctgagcaatttttgaagaccagaaaatattacaaatcagaaaacttatgctaggtgaaaattaaaaggaaaggcagttaaagacagccaattagccaattattagacttgtttttaagaattatagcaaatttgttctaaatgcatgacacatacaaggtgctcaccataaaaaaaaatacaatgagaataagctataatgtatattaagaatttgcaatgctttttgtgaagtaatttatttaagcttcagaagcaccctgtcaggtatacattatattttatcatccattcatagatgagggaattgaggcacatggaagcataagaaacctattcacagttccacaactgaatggtagaactagagactgaacctatgcaattgccagagagctcttttagtagaatttttttgaataaggaaataaaagaaaatcattgacttattttccttgtagacaatgaaaataactaaataatatatgggttttgataatttttttttcttgcatgagcttcacaatctcagtcactcgtttgtttcacatttattgtctgtgccacttgccacattgaaatttatgtgacataggccttgccaagaagttctcacattgttttgaagaagactgaaataccaataaataataataatactcttttgaaggaagaacagttaaggcgttttaatgatcagtgtgagttgatcatatttgcctttaggtgaatcagtctagctttcagtgtggaccatggatttaatgaaaagatgggaggcaaggtctctgggactgggtttagaaagttggaagacaggtgatgaagactaggagggaggatgagcttgaattgatttaggagataaaacacatatgatttgggagttgactttatgtgtatgtttacttgtttatagcataagttgagggtaaatactaaactcacttttggattatttgaggtcttgtgcctgtggatcactgcaaaagttgaagattagtaaagggtctgggatggagataaagaatttttgaatcatcaggatatatgtaaataactaaaagcctagggggagagttacccaggaagagtgtgtaaagtggaaagagggtgcaggttagacctttgggattagggcagaaattagagtgaggcaagtgaggcactggcctgaggttcaaaatataaggggctaacaaagactcagtaatctagaaaaacaataataataataaatatatataggcacacacctttttccttttgcctcaggctccaatgtggctcagcatggtactgaacgtagcatggaaaaggcaggcagagatgagaatttagctataagcactatgagaggtgagatgagaaccacaagagcatagtaggggacttccatggaggaaggatagattaatatgtttttctaataatatttcttatgttccaaatacgtttaatttttatacttttggaaattatacttaatgtttgtcttgtctgctggcaccatttttccttctcaagtttacatggctattaagagatgaaatccacttaattagtacaactagcagtcaatctcattcacgctttcatggatagccagctactgggatctgttaaatttgatggagaatatatgtccctccattgacatatcaaattcacaatatgaatttttatttttaagctccaaagtaaataaacttttcaccagatacccagtaagaaagcaatacctgttctacccttgcctcctgttatatgatatttgaaaatactttctcaagcatgagcttgcttttttgattgttgacaattattttcttccaaaaatagacagtagttgagtttctgaaataaaaaaataaaaacagattctttgcaactaaatacctctttcagtatgtgaaaaatgcagtgtttgtatagagcatgcagatatccaactagaaactcaggcatgcaagtcacgtgacctcttttattttcttgtaactgaacttaattctattgtaagtatctgtgagagtggaaacctgtgtgtcacttgtagtattcatttttccctgcttgtccccctcaccccttatttctgcgagctgatacctaagttttatgagggttggtggcaagtgtgggctgtgaggtaagcccagctgatttttcatgccatcttcccactggtcaccatcatggggactttggagtcatctttcattttcattcattagaaccctttctatccctcacttctctactactttgaagccattcttgaaaagatgacagtcattctgatgttccactcaacactggggttcagagaagttcatggttcaatctactctcccagggcttcgtttgtcgagtcacagattctccatctttcatttacccacacctggtatttgtcagccctctgagaatagcctaaggagctgggcattgatcctctttctccaagatctgccaatatctctgggcccttcactttgcttttggtcctcattttgtctctctgtccattaaatatttatatagactgggtgggaaggatgggagtggaggaaaaaagttacttttaacttatcacccatttcctcctaaatccactgtcaatcactgaagtcctttcaatttttctgaaaacgtgacttctaaaattctaagtccaaaagaaacaccctttgtttctctgctttctgtagttatattatttccttcaagaaatgaaaacccagtggcttctctgcctaataggtataaatttctaggtggaatgggaagggatggtagcaaaactacaaccacctcataaagactgattttgaatttgaatttatcatgaatgatgatcatctcctgccctctatccagcaagttctcaaatgaaggctgttggagtggggagagatggcagagtaagttcctatttgggatgggaaagattatagaaaggtaggcgagggcaggcaatgccagaggaaccccatgttgggaagctgggacattacttgcgtgatcctaaaactgagtgccaacttaaatgtagtgcctcagtgcctcacttacttcaccctgttactggcccaaagggcttccactgtcctggaggtaccagccagcctcaagacccagtagtgtctccacaggtgtttaaacttcagtagcaactgcaaaaccgcagtagcgacccagatggatttggatgtccaggttgagtcagaagtacttgctggctcactctgtgggatttcctggtcattacattaacttctgaattgcactaccagtcatgacgcattattgagtgttttggaacacttgataatggtatgattttactgtgaataatatattactaaatatattattattttcctatccccaagttaatttaactcaaaattggtagacatttgaataaagagatcagtttgcctatgacatcttgatttgagaaaaaccccgtattcaactagttctgcaagtaaattatgtaaacataaatggcatacatacattttaaaaacaattttcctgtggcatttgttgagaacattgcaatgaattagaaaaataaaagtttactttgaagtaagtatattttaagtgatcattactgggcaatagctttcttatttctaacaaatgttagatattattaatgtgtaaatttaataattttgcgtgtgtgtcttaggaaaattaaagaaaataacactttaaagaaaatgcgagcttaaaatttcagcagagggaaaaaaattagagagggaaaaatatactgtgaaatgtgactacctagaaatcccttcagagtataaagctcatttacacatattgtagaccttgtaattttgaagttgaggtggagtctttcattgtatgaattctgacatacaacaggtatttattttaaaataataactggctgcttatgcaaaggcattttgggtagaaagtttagagtctagttgtagatttcaagatgggaacagtggaaaatctcaattatgcctctcttgatagctacattcactccatagttttaatgcccatctatgtgtttattaacagccaaatgaatatctccatccaagatcctgtctgtatccagatgattcttatgatagttccacctagatattgtattggtttctgattatgactatgtcaaaaaccgaattattcatgcctattcctgcctggcttttcttttgctatgttggtagcaaaaataatcactttgtcatctaggcaagaaaactcagggcaattcttgacactaaaaatgctattatcaacaacactgtattgtaactaacatagaataaaagaagactcaaatgtataacatacattcatttaatatttttatgccatttgattttcatttctgcatgaaacaatgaatcattatgtcattgtggtacttgccatatttgatcaattctctgatgcatattttatcacagtttcacatctctggaattaagattcattttatagttaatctgataagaaagtttgtatcagtttaattagcagttttttgttgttgttagtatataaaaataacatatcttaaaaatctctgttgtctttggcactataaaataaagcatgtacagagagaaggcagaaaatattttgaccgaagcaaatgttctccaatttttattaatgttgttggtagatgtgatagctttccatagcactggaaattcatgaaaaggaaactctttgaaaataaaaacataggtatatgaacaatagtcctagtaactgcaagattgcagttcaacttagtttaggataattttgtcttgtatttccagaataaaaagcaattcctctgagtgtctgaatcacatcatttttaaggattctcaaatatattattttcctgtcccaaattaatttaactgaaaatattggtagacatttgtatagagagatcaatttgcttatggtatcttgatttgagaaaaaccctgtatgcacctagttctgcaagtaaattatgtaaacataagtggcataaatgttcatgatttgtaaaatatttgtagttctccttccttatgaatttatgatatgtttaatgtacacaaagcatttttgagtatctgatacaaatacctaatttagattatatgattcagtttctcatatattctttccatctctgtgctgagaagcaaatacatttcactcattttttctgaagttctatgatgtagggagtgcatctaacaaaggatttagctgtgtgacacagtgctgtactctgtaacagtatctcaaataataccggtgataatggtgatgatgaagacaatgaggatggtggatagtgaaccaggctgtttataataactaaattagttgatgaacaactctatgaagcaaatattacttcatgcatttactccttatactccctttcctgctttatttttcttcatagaacatattgccatctaacatactatttttcatattttacttgtttggttgtttagtcattttctccccacgagaatgtaaggtctgtgaagacctattttgttcacaactgtatcttcagctcctgaaatagtgccacacatgtagtaagtatgcaataaataacaattgaatatttactgaaatcttagtgtgtgttaaacactgcttttggtgctgagaatacaactgtgtactttactcttccaaaacttatattctggtggatgagaactattactgttgttttgttaattattatgattataatcctctttttattaatgggaaatacgaagcttggtgaagataagtgaattgctcaatctacacatatataaaaatgtattttgatattcttttgaagaatttttatgtaagttttatctactaacatacacctagatttctgtaagaatacaaagtataccctgaaacagcaagtaaaatatgaagctattgattggtttccgttgtttatatatatatatgaagtatgaactgtgagtattatctcctgaatatttttgggcattaattcaattgctggaaataagttaccttctggagtaatgaacccccttaaagaattaatttattgcatcacacttttcagtatttctgtaacaccactacatataaattatttcactttgaaacttatatagtataaatatttgaatctaaattgtacatatttattaattactaaatattaatggaagatctaacatgttccagccactgtgataagtcatgggaaagggacaaaacggtttttgcccagacagctaagtgggcatttgcacaggtgttaacctcatttcacgatcaagtttcgtcagtacagccttccatgggagttacagctgaagtactgtagcctggtctcagaattcaaggttggcctccctgaggaaccagaatttaaactgaaaataaagatgaaggagggaaggaaggaaggaaaaagaggaatttcacgagagtagaaaacttgtatctgaaagtccgaagatgggggagcatactgattgaagttaagggattgaaacggtgtcagtactgcatggctgaagtcgtagactggagcatgaagaaaagtaccaagagatgatgctgaggacctctccacagagtagtgacaatgatgatgatgataaatatttttttctcgaaaagttctatagtctggttatttcattgagaagtgcatgttatatgttaaaaaggcacattctttgtttgtgatatgctgtaatttagagttttgatatatattagtatccctctttaaaagtatgttttttcctagtgcttcattccacacatggaccagtgttgtcagagatttattctccaggcagaaatatgtaataagatgataattgactaaaaagaagaaaagtgttaactcttaatttcctgaggctgttacaaaaatgctttgctttaattatttatttcagactgattgcaactttctccacatccatgtgacacacaaattaaactcgtttgtaattgtcagccatcagccttgttacttttattttgttcttcactggtttgaaattttaataatggttaagcagggtgctctatttttttaaacaactttatggttaatggaatatagttatctactcagggtttaaactgaactggaaaaaactttcccctgtgtaaggtatgtttcaattagctttatttgcaaaagaagaaaaattttcccttcacagcttccttatctttgaggttgggtttttatgagggcaggcagtggaacccaaagagctcagttgtcagtagagagtttggttaagagagtaagctctagggataatctgcttagctccaattattggttttgccatttactagagtatgaccttgagtaaatttctgattccattactgtctccatttcctcatctctaaattaagagaataatatctacctgatagagtaaatgagtcaatgtgcatagtattcttaaaatcgtggttggcatatatataaccttatgtaagtattattgcttatcattatcagcatttataagggggatgctccgaggtttctgttactacatatggaagcacatcatgatagtggatagagaacaatgtatatggaaaaaccatggagaagtactgagcagcaagatactgaggatggtaatggaagacagaatatttcctctattgcccagaaatttcctagtagcatatttctacagaaacagaaagaagagagagagaaacagccacaaaaatttttttgagcactgtcttatatttgcatatggatggattctttttctgtgatttttttttttttttgcctgtatttctcccttctccaaaaagcctcaacatgatgccttggtcttggagaatttttatcataggatagaggtttgtattgtcgtggggaattccactctggccgaagctctcttgtgtgagctcctgcagggctactaactgctaacctgaaatgtgttccctctcttagaatggcccaagagtgaaatatttattctccgtgtctgacaaggaaatttctcttgggagaagaagttgttcttatagactacgtattagtccaagaatattgagaagggatccaaaagatctggaaccaaatagattgaatttgtttacacagaaaatctttgcataatcataaatattaaactggaattgtatgatgtattataggtcaataagtagtatataataaagcagatgtgtgttaagactatttctatgaaaacaaaatatgtatattttaaaagatattaatgaagcatattactgtatttgcaaataagaaacatctttgcatatgggaaaatacagtgctctgaacaaaagaaatcagcaaaattgtctttagagtctaatggtatattttacctttgcaaaacatttatttggtgctcatagcaaataaatatgtgagttttgctgttttcccgaatgggcatacaatggcagctgtctttctaatcgttcccctattcaaacactaatcggtggaacccacgtaaaatgctagaggcctgaataggtagacaatggcagcagcgtttttaatcacagtcctattcatgcactaatcggagtgatgattaaaggacattagagggagcactttgacatctgatcctttgaactgacgtctgtgcaggctgcactccatagagctcacttggccaaactgatttccttaaataaagtgctgtgatttccaatgtaggaaatattacattagagcctattgaaatgattaggaattgaggagcttttctttaggtgggaatgtggtgtatgctgtatactcacaaaagtgagatcattaatattgcatgtactactttgaatatcagggaccacagagaaatagcatgagaaacgccttcctgcagtcatgcacttaaaatgaatatgaacaaaaatgtggaactctgctgtcatagctctccgttattgaagtttatgaattttgaaatatttgtatttttatataacacgataaagatccacacatcctaactgcatttcatatttttgttttcattaagccaggatatttttaatgttacctatcttgaagttgctttaattacaaaaaaaatgtgttataccctatttgcatggtcatgctttgattcagtagtcattagtgagacagaatggaatattttattttctcttttctttcaaatttctaatatctatttagattttactaacctattccccagaatatttcatgtgatttatcctaaaaatgttaatatctattcagcatttgcaaattgaatcagtagttaaaattccaacatcaatatttgaatatggagctccaaatatcaataactgtatatactacatttatgtgtaatgtatgtaggggaagaaaaaccttttcctttaacctcttatgttcagtggctggggcatgtgaattaatctgacagaagacagattgacaggaaaacatgcatacacattgtatttgatgttcatattttaatttatatgtgcacaagaccttcacatgaaagaaatgaagacagaaagaaggagttaaacccaggggcttacataccattttaataaagggagataaatcgtgcagaagtgataacacaaaggaaaaggggtttgggattctaggggtgataaattgtgggaagataaatatatgagggataccaatggaagataagggctattttagcaaggtttgtttgtgcaaatccatcttggtgccaactttctgtatccagtgataaaggattgttctcctcctggtatggaagaagggaggggaacaccttcacaaaaggaaatttatgtctgcttttaggcagatagggagagagcaaagagcaaagagctctttctgcagtttgttgtttcttaagtgctttcagctcaaaatggtccttataccaaggtgacatattttgcggtgacattctgaccccctcacatacagcctctttggattgtttcctttgtttattatatttcttatttataggattctttcctagaagataggaatatttatcacaaattctggataaatttgactgtgatgtatacttctgaaggtacctaccacacaaatccacaagtttattggcatagacccttgaagctttctttgtaccacctaactctggccctcattctggccacttgaatctgatggagagaactgaccgaggctggggaaatcagattctctcctagatatctatgacaagagattctttttcattctgggctgtttgagcaggaataaaatgaaagcttggtgctgcagggtggccattttccacttgcaacatgtactgaaaatcagaaaaggccaggctgaggagagagaagatagaggcagtcatagaaaaagaagctgcgcaggtttctcatggctttgtgtagggagagttttgcaactttgtgttttgtgagatactcttggatagactctttttattggcttaaactatgtaaatcatgtttgagatatagacaaccaaaaaatcctaaggagcacagtggtatatgtcaagttttaatgacctagatagaggtgttttatttttatgggatatgttaaaattacgattaagttgtgtgaggcagtagggtataatataatcagctctgactcagagacacatgcccaaactgaaatcgtctctacatttactaacttgatcttgggtgtgattcttcaccttaactagctagctctagtttctttcactgttaaatagaaatcttgataattatggtaatctaactacattattttgagagttaaatgaactgaggaattttaaaagggtataatacaaagtttagcacatggtaaatgctcactaagtagtactttttattattaatattttagttttacctaaatattggtaatgactggtaattggtaattcagatgattaatcatttagctttgatttcttcgaataatattttatcttttagtaataaattacagatatcatttgaagtcttttgtgatagttcttgttatcaagatagtatgttatcaagagtgtatgtgagaacccttcctttatggcctactgtggccccatttgtcaaggtatttaatgccgttgactccatttagattctgacaacttttacactttttgtttctcttcttcaattgttttcttcaaagatttatggttttcatgatataaatagtttaactccttggaaacatttgttcttaattatatattttttagctacttgtaaatgggattgttttcttgatttcttttttttttgggtggtttattgttaatgtgtagatatgttactgaatttagtatgttgattttgtattttgtaaatttacagaatttgtttattagtttgaactatttttggtgttggctttcgggttttctatacataagaccatgtcacctgcaaacacacaactgaaccttttcctttacgttttggatgccttttatttctttctcttgcctaattgctctggctaagactttcagtactatgtaaaatagaaatggtaaaagtgggtatccttgtctcgttcctgatcttagaggaaaagctttcagctcttcaccattgaatatgatgttcgttgtgagcttgtgatacatggcttttattgtgttcacgtacattttttctacacctaatgattacagtatttgtataatgaaaggatattcagttttgtccaatgttttttcctgcatcaattgagatgatcctatggtttttgtcctttattctattaatgtggtatatcacacttattgatttgtgtatgttgaaccatccttgcatcctgggggtaaataatgcttgattatggtgaatggtccttttaatgtgctgttgagtttggtttgttagtgttttgttgagtagttaattttgctttttcatttacctaaaggcttctacaactcaaatctttccttcatttcaaagcagttttcttctcgtatcaacagtggcataacccacaattattcatatggttcttccttttttgagtacataagacagaagatgtagaggagtgttcactgcagactgaacggttggttatgagaactgaggtccagagttaggacagagtttagaactacgtgagctcttaataccaatatcagactgacagaagcaggcactcgtttaataaatttattgtgtttatgtttgagatatggaggttctctaaagtgaccctctgttatccatgtctaatgacagtattgaactctaatattctcctatctgatgtctctgcctctccccttgtcctcagacattaaaaaaaatgcaactgtattattattttgaaacctaaaatagattatgttttccattgtcttcctgtgtcactcagaataaaacctggtcctattatagcctacaagcccctatcctcatctcctgctgcttgttttcccaggctcctagtcactgtcttctggcttccttgatttttcatgaacacttcctgcggccttctgcctcaaggcatttgcactaccttttctttatgttgttttatatacatactgcacttccttactttcatcacatgctagctactcagtgtgaattttcctaacacgcaacatcatatgtaacattcatcatccagcattccttattactcctaaccacattttatttattactcctgactacattttattttctctacagaatttattatcatctctatctttactgttttgcctaatgcctctttccgtctctagggttcaagtttcctgagagcagtagcttagtcagttttgttcacaactgtaacttcagggtctacaacaatacctggcacctcgtggctacttaaatgaatgaaacaaagattccagagactaaactatgctactatctcaaatctaatcaatgatataaaaaatacagtcacacaatataaaaattgaagttcacatttaaagtttggtttttcaaattcatttgcttctttaaacacatccatcagtatctgttgtcatacctctaactcattaacagaaggccagtaaagaagctgtcttgtggaagccatgcttagccaccacatgagtaattgctctgcacgagccgtcctgtggcatctctcaactgaaccgaaagtcttccacttcaaagtctatggcaaggtggttaggagaatgaatggaaaatagaggtttattttagatatacttttggaattagtttttgaggatttatcccaatgctaagtaaggaagttatctgtctgtggccatgtaactgcatgcatttccatctcttctattatcaaattagagaaaacctcacaatatagtaaactcttcttaattcaaagataatttgagttactagagggtagggaattgtgtcttagtcttctttgtttcacctatgtgtatataaccacttatagctcaatagttcaatgaataatgaaaaaatagaagttgtattgtatatattaatttcaaatatatgccagtgttgatattttcaattcatttaggtacttgtttgtattaggcttcttttaaaaacctggggttttaggcagagacatttagggcatggttcgatcagaattgctgttgctcagtcttcatggtctgcccatacagttctgccaattacatattcatagtataattggcacataattgttattgatctttacgctcatttgagatctacctcttatactgttaaacacacacatttactgttatttttagaaaaaaatttactgcctatatattgtgagaagaatggaactgtgtggttaatcagagggtgaaggaggatggcttgaaggaacagaacaagatgcaataagaaaatgtagatggaaagtctatggtaacttttccatcacataaatgaatgaatacccagtattgaataaatcatggattttaggtcttaacattccatattctttgaaataaattattttcaaatatccccagagatatttccatattttcagaaatattatcttagaacaaccacaagcacagagtatatagaagcttgagaacacctgtggtgagaaaaattaaatgcatctcatatggttcagtcaacaagcttactctgcttgttagagctgtttattttaaatttcctataaaatccaaataataggcagacaagtctttacctgaccaacttgttgtgtaagttgtcttatactgtttgattctcaaaccccctggtgagaatgtcccaaagcctatggaagaagcagacacatacaaggcagtagacattttttccctctccttctgcagcaatatttcctcctctacaaacacatagcctaggtttgttacttcaaaaaaaaaagtgaaagtatgttattacaactagaagcattcacagatataaccagctaaataaatctcttgccctcacctagaatcaggcttcaaaaacactatccattctctagaaatgccaggctctcatatcttactcttaaagccaccataatgtggctttcacctcctctgcaccggtgaaactgctgttatgaaagtttcaaatgacctctttgttactattaataaatctggtgaacatatttccatgtgtttccttaccagaacttcgtataatttggcactgtggataccttccttctcgaagtatttttcttcttagaacagcttctcgagtcgccatcctcactattcagtattccttctgcccatctcttccttggcctcagtttttatctaacatctgtcttaagctttctcttatcaagatttattatctacagaggtgtggggggaggaggggagagagagagaaaaaagagagagatgcctactagacttctttcagatgtaacttcctttcttccaaatcaattccactccttagtggcctagagtcatctctttgactcaggcctgaaaacaatcaccattcaaatatgtttactgaatccaatcttgaccttcaggcttcaactaagatttcataccttctggaaaatgaatctttcccaggcccccagccccctgagcctccctctaatatagcccactctgcccgcttctgcttttctttgtccttttttctttcaattaatcaatctctgttgagggcttattaagtgcctagcactgccttaacatttggaaaataacaaaacagaccaaaagttttgcttcatgggactctcattctagtcacggaaagacagacaacagacacttataaataatcacattatacagttttaaaacttacttatattgtattaatattgctcgtttacttgtcttttttcccaaggatataagttcctttacctactaagttcctggcattttattgtgtgcttaaaaatatttattgactctagaatctccctttcacacgaaatcagtgagtgctcttgccaaattaggctggtctgtattccagggttttatataaattagctttagtccaatgtcaccttcatgctttattaagactctagagataagttgcctctggacagatctatattactgtgttacatgcattaattattttatttttattctagtttgaagggttttttaaaattggttgctctccaatattatatataattatatatcacattgtaacttagcgttataatgaattgttcatcgtataaagacttctagaaaagtcttctgctagttgttacatacaaggcagaatttaactgatttgtgggcagtacatattgatctattccattaattttaatgaatgcataatattctataatatacatatgtaattatatatttaatcatctttttctaaggacatttactacttctgagtctttaccattgcaaatcatgtgaccgtaaacctctctgtatatatcttcttatgtatatatctgcatggttctctaatatagcttcctagaagtggaattgttggtttaaacagtgaatgctgacaaattattctctagaaaggcattaccaatttataatctcccaaatagtaactgctgtttcccttccctttttcagacctttactttatagatataaatgctgttatgtgtgtgtaattttttcatattctgatgatcatatggcatttctttatcaaagaaaggggagggtaacctctgaatctgtggcctaggtcatgttcctctgctggatgccctcaatgcataccatatcacattttatcctaatgattaatatcattattattatatttcactattatcatttcttgctttaacagtcataacttcttgagtaaaatatatcactaagattaaaaaaataatgattacagcttggataggtcttgggtataaacattttctcattttattttttgaaaagtatttttcgtattacagttttgcctagtagatattcgagattgatgtgatgattttgtccaaatgggcatgtttttcctgttgctatatttgttatcattttctcattcacttacatggtagtgagaaagtatagaataattgccttttttgaattgactataaaatgtttttaatttgatataatattaggtcattattttttaatgttctaatgtttattgagagtaaagtatatcccctaactgtgggatattatgtttgacatataccaattaatttgagtttttgagttacattgtttaaacaatactgtcaggtctctgtttgaacaagtcatatcacacagtgtgcacagtgtagataaggaagatgaacaataaagaaataaacaaatagacaaaattttagatactggtgaatataaaatagggagaagtaagagttgttgactggtcagggaatttaggttggatagtctccaaagaggtatcttttgtcatacttgggtagtatattattgtggcttttctttttgcttatttaatatattttttctctatgcttttctctttaattggatttctcagcttgtgtctggcttgtttctccttagtgtatgtttgaatttaaatataattccaggtgaaaaatgtagtctattattgatgactggaaaccatttaaactcatagtaataaatgataaatttgtttctatcaagtgttaaatgcttttatgagtttgtttttaaatctttttactgttttctgttttatcgtacatatactctggtatattttattgtcttctgtagtgatttaggaggaaaattcccctttaaaaaataatagtggttatctttaagaccttattaactatgtttaaactgagattgttctaattttctaagtcagtgattaaataatagtaaggattttaggatctacacttctattcatgaatattttcattgttttgcatttcttactttatgacatctttgttttatttacatttatacatttctcctggtacatatgtggaaaagagtctttagagtgtagggggtcatagaggctgcaaatgtagaacattgtagcagaatgtcaaattgtttatgctatttatacttccacagcaacattttagaaataatcttaatccctttccgcattgtctccaacaattagtattgtcatcctctaaattttggttcacgttggggtgtaaaattatatctcaatacattcataatttgacttttcccaaattactagtaagggatgaatctaatgagtttgaacatcgttttatgcttagggctttgcatgtttctcttgtgtgccataactccatgtcttatgtccatttttttgttgttatattgtctttttattattgatattgaagagcactttatataacaaattatataatttttacctttatgtgttgcaaatatcttccctcagtttgtggcatatcttttcactctttttaaattttgatgaataaatgttcttatttttaatttggttgaatttatcacccttttattttacagttatttttttttgtttaaaattcattgaagttatatctcaaaatgacattttcccactacttttgtgtaaaacttggtaagtctttacaatgatacaaagtctttttttcttcctgagttaaggagcatcttcttttgctatactcagcttactgtttctgcatcatttgttatgttttattcttttaagatatccactatccatgtattgaatttcttttactagtacaaaatagttatcattttcccttaatttattttatgtctattttttgcggtgtattttgagaaatgatctcaaattgatctgtgatactagtaaattgtctttctgtctgtaacgtcagttctattttctaatgcttacaaaggatttatgtttctattattgcattttagttttctataagtgcctttctctcatcccatcctcatcttatttagctagattttatctcaaaagatatataaaccttaaaaaatgttgtcctgatctcttttttaagtccctcctttttttttaccctgtagctttttatcgtttgagaggacaaaacattttctttgtgtattaaatatctttagagtaatgctttccaatgtttcatataatgtgatttttttaattactagagttgtttttatatggcttttgttttcagtattttaggttagaaatagttttagccattttctgttaactgactttgtatctattatttcagttgcaaatttcagtttctggtttgtcatttgtatggaatgtcgttgtgcactgagaatgtcactggttatattttatttttaacttaaagatttgtccagtactcaggtgcctcatatttactggaatttgtgtatttaattttttactttgtgcataattctctgctatgtgttggtttccactatagatatgttttatttcatttgttttagaaaatttcataataccttaataccttatgtcccacagtaagctaattttatgtttttctcttttatactttttagtacaaatatggtttgcatctctttgtaattgttttcccgtagtaagtaagatatgtttaaatgtgatctcaaaaaatgtttagaattttatttatctgtgtagagacagggtcttgttcttgggctcaagtgatcctcccatctcagcctctggggtagctgggactataggagtgcatcaccacacccagctaatttttgtatttttagtagagacagggtttcgttatgctgcccagactgttctcaaactcttggactcaagtgatcggcctgccttggcctcccaaagtgctgggattatagccgtgagccaccgcacccagcctaatatttagaatttttatctcccatacttatgaaaatctgaggtatctcgtttgatctatcagagaaaaatatggaaaaatatcaaatggttacaaatatttatattcataatgagccaccacacccagcctaatatttagaatttctatctcccatatttatgaaaatctgaggaaaaattattaaattgttacaaatatttatattcatagtggaacatatctttgtcatttatatctttgtttacatttataatgagtaaatacgtgagtatttatttttatttttactattattaaataatgagtaaaagaaaggttttgcatactagtatactaaagagacttagagaaaggaatccttgtcgttgcttgtcttgctggagcctgttgacttcagtagtgatagcaccatgttcaagagaccaaagaagagacctggagctagtgaaggacacatagggtttaccaagagaacttacatatagggtggtccagtggtggtgggctgtacaggagaactgctaccgcttgtaaaaaacatgcagtttatatagcattttcacttagcgttctccccttagcatcctccatctgacaacttttaacccgaaacaaagggccttgatcccctgtacagcccatgttccccatgaggggccaggttcagatgttctttatagataaggaatgaatctccaggttgatcattcctggattccttagctcagaactccaaataaatattagttattgctttcagatgcatctgccatacgctgctctttattgaaaagggtggtgaatggtgttgctagacaacacaatcataccatagagattcttttttttaagcttacatattttatatttaaaaagagtattgcttagagttatttgtgtaataggcaaacagacagaaatcttaaagctgaagaataaaacataacacagaaaaatcacttatttttaagaacaaagaaggaaatgattcaaaaaggagggaaattatcaaaaattaccactagaaataacagaggagaaaaagttgagtaaaaatttgaaaaccgagtaaaattaagtagtagttaaattaagttctatgaattgtaaattcatagaactgtaacatgacatgttatgctgaatcaaaattaagtactactgctacataatatttgtcaaacacattctgcatttgggattaaagatttcatgtatatattcattaagcatatattatgactactattaaaattgttttgacagtagcaaagatttgataatacttaattgaatgaagtactaggtagtaatgcctattttttccccaaaggcttgtatgtttacgtagtttcattttttttaaaccagtttattttggtaaatatattagtatcataacttgattaaatttagtctttggtatacagaaataaagtttgagtttcaagcatcttaactgaagatttccctgacaaaattctgattacagccaatgttaatgggactagtcaaacaggaaaaacagatgtactatctttataatatctggaagtagaagaaaggaagcaatttattcatgaaattcacttttaaataagctgcatttattaaaacactatcctagaattgtaatcctatcaaggtttcctaattacttaaatagccataacacaataaaacaaaaaatcataattttgaagacacttgttgtgtttctggattattttagcagacttaacaaaaacacttgaattcgtggcctacaaatcaaataagattgaagcaatttagttatgcacttcatatataaataataatctaaagttataaaatattatcttacagattccagtcctatcaagcttccatttgagccactgtataatcacttaatagcagaagaaataaaagggaagaagttaaaattccttaagtaaagagacgagaaaagcattttgctataattctgaatctttagaaacagactcattggaagaggatcaacttatgtttcagaaaaactcccaaaccaacatttgtttttcctctgctctcatacaacacagcaatcattcacacagaagacttgtttgaccaagaagccccatacaccaagcagtagacaccagttgagtctcttcctagtcagactaacattatttacctggagatagtgttagattgcacaagctgaaggctcaggcctcgagactgcacccctttcagacactagtatcaagtcgggtctccagaacttcagaccagctagcttcaaattgagattcccatgaccacctctttgggtttgactaatttgttgaagcagctcacaggactcagagaaacacttgtttacacttgcctgtttcttgtaaatgatattacaaaggatacagatgaagagatgcatagggtgagctacggaagaaggggtgtggagcttccatgccctcgggaacaccaccctccatgaaactgtatgtggtcagctatgtagaagctctctgaatcctctcgttttgggtttttatggaggcttcattacataggcgtgactgattaaaccatggccattggtaatcagcttgtccttcagctccttttcccatccttggaagttgggggatggggctcaaagttccaatcctttaatcatggcttggtctttttggtaaccagccttatcctgatgctatcagtcaacattaatatacaaaaagaaagcactttggagattccaaggattttaggagttgtatgccaggaaacatggaggaagatatatactccatgatagctaggaaattgactcacttctatgtttaggctattttcagtgtatgtcttttaagacatatactccatgatagctaggaaattgactcacttctatttttcaggctatggggtctgaagacaaaatccagtgctggtattgagacccttcttgttgtcaggggaagatgtactgggcaaggcaagtttctgggaaatagggttcttggagaggttcatctttatagaataggaggttggggagaggatcctcttctcagtacctgctactggggatccctttgtaatagctgccgtttaacagaatgaatgataggatagattcagagcaccagaacctgaaccagaaactccacatcagtgggagagttgagcccaaaggaggtctgcagcatctgccaatgccagagataccaggagaaactcagttttgcgcttatggaggacctcctatgtcaggagggagtggtctgttggaaggaccctgcttatgcagtcctgagcctgggctgggtagtgggtggcatccggtccatatcacgcatgaggccttgcatttgcacaccttcacaacttgatactcctccttcatcagagatctggttagccagagtgtgccctggtggtcctcagaagtctctgctaaatgtttcacttggaatatcaaggatattaggatattttttgaaacatgtaaattgttaataatttgtcttatgtgcaggcattttgttttcttacatgattaaggtttcactcacacaacagaactgtcaacctgttatttgagtattttgctcattgaaaataatctggctttgataataggccaatgacctttttttttctaaaaacttttaggcttatattttataggtgtccatctcttcacatgcatgactgatcttttcacctcccttgggaagattctcctctatctttatggggtaaacacagtctaaataggatattttgtgaaaatatatttcatttctttgattcagttcaagaaggacttgaaatttccaccagcaattttgcctctcctttctgtgtgcgttttcctgttagtttgtttctgagtgcggtgaagctttcccagtttgcagacttttaatatgacctcccctctttcagttaatttagtgagcattcatgttttttgaatcaagattttctaaataactcagctccattagtaagattcttcaaaattttgattcatcttctaagatgtctccgtttctgttgcatttttatatccaagttcttagcatccatgtcgtcgtctccaagaacagtagcccagtctctcacctttaacttgtgttcacacagaagcttgatcagacttgtcatattttagaacttgtttcctacacattttagaattttctagcattttattctgcttagtatgtttgctccctcttcccttttccactcttcagcttcttgtgaaagcagctctgtgtttccctgaagattggaatttttatccgaagtgtctttcaatgctgtctgaagttgttcttcattgttctgatgtatttcgaaggctgttttggttgcagctacgtgaattgtgtttcgatgaatctcctaaaaactgaaacattctgtctttaagctaccaacctaaattgttctaaacatttagattttttttggtccttttctgagagtctttaatataagcccaagtaaagagttggggctttctagtgctttattaaagatttccagtttgtgaatttctaataatttgttcttaagtttgtcttctaccaaagttgatttaaggccatttttttttgaatgagacaaatctcataaatatgttttttcttctaaagtgacaaaaactccagtagtctgttctttgtccctacttgcatccagaaatctgcagggacctgtgcctgggcttagggcctctggcagcactaccgtcacctgtcatagcagttccaggaccagcttgacacagagcaccatggccaacaacacgttctctgtgactcccgaggccactgctgagctatctcaggtcgccagaagcctgcctaccactatgaactttcgagaacacacgtatacaattcttctctgaaccgaacaagtgcctggcaatgaggacagacctcagtggaggttgggaaggggaagcaaacagtagaacacagctttcccacctccttcacatcctgacactcagagactataatagaatcacctggcccctgagatatgcaggaggctgaggtgatgggcttagctgatgggatcaaggtcttgtcatacccataaagcattcatgggttctctgttgggaagcataaactgcgttggatttgcatctcctaggcttggccagtgctcctccttctcttaataaacttttcgttctgtggccatggacatctcaccctgctcatgatgggcacaagaatctcctgaccctgtaccctcttttgtttgtatttggctggtcttgaatgtacataagcagggggtatgggagtggtttggaaggctgaaccaagagtttcaacttacttcactaataccagctttcaaaactaaggaagagaagtattcagtagaattttcaaacttttcacgtatcagcaatgtgctatctaagttgattttaaactcttcctgaatgtgataaaatgttttctgacacaaaagcctttctacatgctagtgttcagaatcttaaactgggggcatttgatactgaatagaactctctctgctcccatggtaggagtgttggggcacctgagcttcttcccagtgtagtggatggctctttgaactataaccatgtattacataaatgtattatatgttatttttagctactattgagtatcagattgagaatatgcagtaagctaaataaacttttggaaattgatgtatgatattaaagatgctgcttattaaagtctcaacatctgtaaaaaaatctgcaaatacagatattttcatgaattcctttgcagaaatctcttgtgtttctaaatttatcagagaatcttgcacatctctgtctttgctccaaaatttatttgcatagaggcttgaaaaatcaagaaaaaaaggcaaacaattaaataatatgaatgttttctttttatgtatatattttctggataatagaaatggtgaattggtatttcctttttattctgaagagttaacaatataatcagcagtcaaatgtgtgagcaacagacaggaagatgagacaaagcaatattttaattctgttcctataagaaatgtcttttcattttttttcttatatgagattcttttttggccataagtattttttgcaaggatgagacagatttgcctccacatggactggtttattataacattttcttttaattgtctgagtatagttttgtaaagcaaaacaatactggaaagtgggagaacactatttatgttaactacgcaatcttagacaagtcacttgacttctgtgcattatctgatgatctcttgttatctgatcatgtccttcatgtctacttcctagtaaaagtgttagtctgaagataattgaagatgatgtgtaaaacattttggaaaatactaaattttaaataaactgtagctgttaatttattcatatggtttaatagatttactgaaaatcttcatttgggtaatattctagttatagactctaggccacatgtagtgtaatatgtatcacacttggttaggaacaaaatcagccttaaggttgtgctcagcaatatcataaagactgatgtttatcaagtaagcccacatttggcaacacaagcttaattgtttttatcagagcagttcacctgcttcagaaacttagtatgacaatacccagagagtttattgaatgaagatatgcttaagactgtgcataactgaactaacagcatagaagtttctgaaggattgatttaaatataaatcaataattaattcagtacattgatattgagcgttaattcaggaaactgatattaccatataataaactatgatagaacaagcactgggttatgcaacagacatttatacatagaggacagttcctgccctcataatgtttagtgcaggagggagacctacagaatgctacagtaaaacaagagaaacaacttgacacatgcccaagtgctaggatgcccttctgtgcaaccattactcagaatgggctccctgggtatcaggggagacttctgcctagaagtgatgtcatgatacaaaggggtttggatattgacagccaattgattttcaataataaattggtgaagtatccctgagggaaatacatctgaataagtcttgctaaagtagcttccagtgtgccagcttactaaattataatgaggaaaatgtgtatgagtatttgaattgtgacgaacatcattttttgcctgtgtttcagcttcatggggtaacacatcatcattataaatatgttgttgatttaacctgagaaatcatcatccttgaagaagaaaatctattgggagtcaaattgtattcagaaagttgctatatgagcatcagatcagttgaatttgagtaagacgaaaaatagttggcattatacaaagcagtttaacaatggaaatcactgataaaaatgcagtgttcattgctcaatggctacactccacttgtacaatttggataacatcatcattaatacaataagaattactgtaatagattccatgttattatgttttattcttcagtttaaagatgggaaaactgaattttggaaaactaccagctctgtgatgttgaggaggttacttcaactgtctagtcctcagtttcctcatttataaaatgaggatgaaagtaatatatactaatattagtaataacagtaaataataactcttatgtatgtgactccttaggtctggcacataataagcactgttatgttataatagcactaatcaggtatgattatcccacctaagagaaaatagaaagtaaattaaaacagaattcaaatgattagtttttaatgtaaggatttctgattttttaaatctaggtaatagctacttgaaatttcctagtgctggtccttgaatgcttgaatggcttaatttccacattctttcatttggtttccttcaggcatcaggtagctgcactttctttttctttctttctttttttttttttttgtaaattgcacagtctctggtatgtctttttttttttctatactttaaactctagggtacatgtgcacaacatgcaggtttgatacataggtatacatgtgtcatgttggtttgctgcactttctgcctggttcaaagatgcaagctttaagcattttcttttttacagtcctggttttcctgaattaaacacaaacacaaacatgtagacaaatgtagacagaaaatcctcatgtatagtgcattataattgatagaaaactttcacatatatttgtttagagcctagagcccagtttctttttttttttttctttgctactgtcaccattagccaaggtagaaatttcaaaagttggcctggtatttgctgagtttggaggactagggttaaatatcatatttggacttcgggacagaaactttctgtaaaatgttatgattatgtagagatttgaaaagactacataggggaggtccgaatgcacctgcatatttaaattataactatattttcttgaatttccgtgatgctgtatgccattcatgtgttttacctttatttgaccttgaccttacatgcactatgtgcatctaggagatttaatacatatagttggtgaaaggaataaagaatgaagtgacatattacactaacataaaaataaggagaatcctaatctgacctcatcataagcaatactttccacttacttatttgaataagagtattaaataaagggcaacagaagtgacatatatatatatatatatggtaattagacaatgataatttatgttccaaaattataaattgttagaaacttatcatagtgtataaaagtctaaatgaaaatgtccttccctatatatttttgtattaatagagattatggctatctgttcttcaaataatatctccttgagcatcattgctttgtgaaatgacaaaatattatgacatatttaacttatgaaagatcctaaagttctgttttaccctcagcttttcatagtatgtgttactgtgttttattacatagacaatttaagaaaccagaggacaattcatttttttctgtgaagtagcaaattggtaaggaatcatgggagataatatatcatattcttaaaaaggacatgtgttttaaaaatcaccattgatttgatttttaatatatcatttatagaacagatggtggagttatagttataagcaatgaagtacaaaaatcaccttgctggatggtttttttgtaggcaatttgctcgatcaaattaagttggaaaaaataggtgaccgaattctatagatgacactattggtagttttatttttactgtgatctcctgtgtttttatctgtcatgattgcacagcaccctttatattcttcttcttctcatttttccttctattcagtcactctggcattctgaggctgatattttagatatttaaaaccggattctactccagaaaatccatttgttttaaagaattcatatgagataaaaggactgttgaatcaaaggaccaaatagttcattaagaagcattgtaaaagtgaataatgtactaataaaaagtttcatacttcattttcatatctaagaatttagttaagcatatcttaatttatttctttaattaatacctactttagaagttaagtaacagagaaaattagagatttaacctacattttaccatttgcaagaaaggtacaaaaatattctataccagctgtaatcatgcatgactttaatcagatatttggagacctatttcaattgcctgcggtgttagctattcaaactcaaaatattctgtaagattcccttataacttgagaaacagatgactcatttcccttagacagctcagcttgtgcaattttagctgtggagaatgagctgtccattattttttatcaccattctctgctgaatgcatttgctctttcttcctttccattgcttgtgtttgtttatctaatttggattattagcatgccataatggtctataattttttcccctcagtcatttacttctcaggcaggaaatttcttagtgctcctgaggacaacaacaacatgtgatattttgtttttgttaaagtcacaaaattaaaagtttagaagacactcatgtcttcaggaaaagctctattcaaacactgctgaggaatattggccagtattgtttcctgtaattttgtagaaataaaatttgtaaatttgtagaaataaagatagaactgatctttgtgatgaatggcaagtgtggcaaacttaaaattaatcaaatatcttcctttatttttatcattattattaaggttctttgaaaattatgaaagataatacagttcttatttgtggagtgcttggagtgtgctggttctggtgccaaacttctaaggttcacatctaggctctgtcagtttctactcaggaaacctaggcaagtcatttaagctccgggcttccgttttctcagctggcgaaaaaaaaaaaaatgaatgtagaaatggctcttttacagggctgttgaagtgtttacaaattaagacatataaagcacttgcttagaacaatgccatatatagagtaagaactcagtaagagttaactactaaaggatttttagtgtacagaattcaggaaatacatatacatagaacaaaagcaaatagaatcacttgaaatcctaccacctagaaataagtcaataacattttgaagtgtgttcatttaatcttattctatatgtctatatttttatttaaaaatgagattgtagtgtatattcctagtttgtaactttgttcatttaaaataatatgcaaatgttttgcataatcttgtattatactacacattatttaagtgacttcagtatcacaataatatggtaatttggttatctaatgctctagagctaatcattaaatttttatacagggctttttttgtttgttttgttttttgctatcataaccaatgcctcaattggtgtaattgtaatcactatcatttcacgtatttaagagtatttccttaggatatatacagattttctttctaatatttagatttcagtcattacttacaactcagacaagcttaaattgatccaatttcaaatgtttggagacatatgactcctaatctccttataatacacagaaaaaaatcccgaaacctttcttcattgttttcctctgaaaacctttgttctttatttgagcttctctaaaacaagtgtaatactcaagatgctggttaatggtgccatgcagagggagattctgcttatacttaattatacaacataatctttcctttataagtgtgatgcaatagcactgattcatatcaaattaagcattattgtatataataattgtgcttgatattttcatgctagatacgcataaaagaaaactaatacatctgttgccctaataacataaaatataattgcatttcacagtccaacttcctgaatactctaaagtaacactttcacatcctcttaaaagatgaactgaatttacttcacttcactcaatatgacatttttggaaaatagtcactaaaagtttcttaaatgtttttaaatagaagtggtatttgtgcagcctgcaatcccagcacttttggaagccgaggtgggtggatcacgaggtcaggagattgagaccatcctggctaacacggtgaaaccccgtctctactaaaaatacaaaaagttagccggccgtggtggcaggcgcctatagttggaggtactagggaggctgaggcaggagaatggcatgaacccgggaggcggagcttgcagtgagccaagatcacgccactgcactccagcctgggtgatagagcgagactccgtctcaaaaaaaaagaagtgatattttctcttgttcgttagaggggtataacaattttcattaacattgaatattttaatattttaaatgctatattttcaccttagtttcctattattgtatgttctttgtgggtttcaccatttatgaatataaaacaatcatgtgctttgcattcacatagcccatccttttatttttaaattctggcatttgatatagagatatagcttgtgtatgacagagtaagctttatttggttatttttgattctgagaatcttttcctttaatagaaaagtttaaccttatttttaatttacatatttggacttgcattcaaatgctgtattagctcgcagcccacccctacaatgtatatagtatttctttcttttgttgtttttgctgaaattttaagtttttctcctgattaatgtcatacactatattttaattctgtaagtacttaatattaaattttaaacataattgaattgttttttataattgtcaataagtatcagagtcaataaatagagtcaggctccattgagtcccttcatttaagcagataaaattagcatgcctttattccctgcctgacaataccttctgttattttgttagaatatgcctgtgtttgaaatgtgttctactttttattttttggcactaggaatcctttttcaaagaatgattttaaatatttttattaagcttcataggtatgttgaagacataataccatttgcttaagtttgtaacacttttatttttcatttattttcagtttgtatgttacatattccttctatttaagaaattatgtaaatggagagagtttttgtttgagtaattatttgacgtgtttttgtagagattatattcttattctttagcagtcactgtattccaaatttattttgtggttcctgggaagaaagacagttattttgaggaaaaatataaaactccatgtccagttctaaattcacatagtccagttctaaattcacatagtccagttctaaattcatggcaatccgttggaaataaatgactgattcttaggtaaaagttccaaagtgtaagtgggatttgaaggtgaatagctaaaaatgatacctggggcagccatccctccctccactttatggttttgaatttcacaactgaaaagtgctgtttttttgaaaatctgtacttcttactgaatatttctgttatgaaaacatacgatgaactaatgttttattagttgtacattttgagaagttaaacataggtgaacaaataatagtcattaaaaaatagaaagtatgatgtgattgttttcctatgattttaagacaatgatgctacataactatttccctgtaaagacttcatactgtaatttgaataaatgcaaacattatcattgttgaacaaaataaacaaatattgtttcttctttatattcataccaatctcagtacttcacttctaataccagatgtgtggggttttcccaccccaagtaattctccagttctctgaggacaccaactaggtgttctgcaacttaattctgacacgatctacctggatgtagcatcacatcctgggggttatgggctcagtcccacaagacttcccccgagtcagatgccaaacacaagtccaggctgtctcttgtgtctctgaacaactatctataaatcagatgttgcaagagcaccctccttaggttcaatcatttgctggaatggctcagagaactcaggaaaacagtttatttattagattcccagttttttttaaataaaggaatgcaacataggaacaaccaattggaggagatgcatagagcaaggtatggggaaaaaagacacggagcttccatgtcctgtcttggttgtgccaccatcccagtgtcacgtgatccttgaggtgtcacttcaccagccggaaacctctgtgttcaacaacgccttctgcctgagtattgcccatgccacctgggctcattctgcccactcggcccagcaggctgttctcggctcgcaccaccagtctggatcccatacctgcccagggcaagccagttgcagagtggcaagaggtgtgtgagtgagtgagtgtggggtccacccattgcacacagccagggatgcttgctgctgcagcagggtgggcagctccaggcactggtacaggtcccggctccatgtgaggctgcagctggatcagatgtaccacatgcggcatctgctgtatgcacccacacgtggatgaggggaatgtgatggtgcccggaagcttggaaatgtcaggagccacagagccccaaagaggatgtgacagccctggatcaggtaacccctaggtctggcctccctgaagggccacagctctcctctccttcatgtctcccacaacctggcgagcagtaggaggattctgtttcagccctatttttgttactgctctttcattcccaccatttggtgggtcctgagttcttgtcccatgtccaggaagaatgaggtacgcaggctactggagggagagcaaggtagaaaggagcttcactgtgtgacagaacagtactcgagagacccatagtggttagcagctttccacaggcaggtcgtcctaatgagtgtccagctctcagcagaaaggagacctggagtgggtagcttctttctgtaggcaggtcgtcccaactagtggtgaagacccaaattgggtagctcctttccacagctggttgtcctgatgtctctgagtctggctgagtccagagtttgtatgggcttcagaagggagtaagtgtgtgctgattggtctataggtggctgtgggcaggtccagaaaaagcactgtaagttctaactccagggactccacctggaactgacagtccagccctcatgcttcaggaagtccctggcttgaaggtggggcttcactggggacccgcccctttccatgcttgaggctgtctgcgtattgctgccattgatcaggtaatctacagtgcccaggctatttgtgccaagagtgcctgcaggcccatgctgagcacccctcagcaccccctgctttccactgttgttcatcggtacccaaagtccagaggggcacaaggtgagagacagctggcctgtcagcactgctgcaaatgtgtgcacacccagccaggttgcgacagcacctgggctcaggcacaactttgctccaaaatcagagcaggtgcctgggtggggagagaccaggtagtgggagcaggcacttctgagactgcaggggcagtggggggtttcccaggcccctgagaaggcagggttgcccaggtctggagccacagctgggtggctgcagccgcacccaagagggcaaggctcccaccctgccaactcagaagtgtgtggggctcccacctgtacctggctcctgctggccctatggagggtgtagcgctggccatgcttcctccagccatacctccccagctgcagctggtgtcttcacagcagccactccagatagaccaccgctgttatcaccagcacctccacatgttcactgacccaaagctctgtgagcccctttcttttgtttttataagggttacattatgtaggcatgattgatcaaattattggtcatttttaactcaaacttcagcccctctcccttctcctaggataggggatggggctaaaagttccaactctgtaatcacacggttgattgactggcaaccagcccccattctgaagctgtacaggagcctccaggcatcagtcatctcatcagcatacaaaaagacacttacgacttctgagattacaaagcttataggagctgtgtgccagaaaacagggatgaaaaccaaaatatgtattttttattatattgcagtatcaccatggtttggcaagattctctgtgatctgaaacctgtctcctatttttccttctaccattatgtaccttattatcatattttaggcatactgactctcttttagggtctttgcagttcctttccctttgttaagatcttgaaaatgtcttccctgaccattctgtttgtaatagatctttatttccctatcactttattctcctttctttccctgtagtgtttaacactatctgataaactctgatagtatctgaggttatcacatagtgttaaatgtaaacatttgaagtatgtatattttttcatattttaaaaagatattttaagtatatatttgtatcatctctcccctattcattaaaatgtaagcttatgagggcagatgcctagaatatttagaataaatatttagaataaactctaaaagtattgtaaatttttttctaggaaattcatacagatcaaattcatacaaatgctgtacatatgaaaataattatggagtgtttagagtattgcttactaaattaatgaacatttgacttcttatggaaagaaacatgagtatcctttaggtattccatcaaacaaggtcagtctgattgaatgctataaataagtgttaaagaaaaccaagttcacatttctaacttgtctaggaaaataaaatttctcacacagtcaatattgtaatgtccactggggattgttcagaaggctccatagatgatggctttgggccagacaatcagattatgctaagggaagttaagataaaatcctgttgcctatactgaagagaaacatattatttgctatgaggtaaaatagcctcttctactaaatctgaatgttctagtgagttgaagtgttatttatattcaaaagaacatatagataggtgtaggggtgagttattgctatagtgagaagctgtaaagcaatattttgttgattatggtaaaaattggttaaatgcattgggtaacttttccaattttaagctcaattaataagaagggaaattgagaccctgagtaggttttctgagataggcgtctgtataaattgagacttaagagaagtcaggatgatgaaggaaggctaaaagattggattgttcaggcttgagactagaagagtggggagttaataacagtctttaaggatgaagggttcttataagagaaagaagactagctgttttccatctccagtgagtacagaacaagaagatgggatttaacaaatatttattgaacatctccaccaagtgcagaacaagaggatgggaagtataagtgctttagatgagaactaaaaaatgtactaagatgaagattttaaatccttgagaggttatgaattttgttttttagagatcttttaaacaatatagattttctcttcataactttataaataggcactagtgtcaattcaccttaacaaacgtttattgcattcttaaagccccttccagtttaatgatttcagcaatgtgtcagtgaatagagggctgataactttgtagaactagtcaacatttaagctgtttaaaataataatcgtgatgttagttataataattaatgaaatcagtagaagagtaaaaggtattaatagttgcatttagtagaatcattatgcaacataagttcctgtatgaattgtagaaagcattgaaatatttggattactcaattgtattaaaatgtcttctgatagaaataaatatatattagtgagagagaaaatcaacttgaatgccacctagtatgatcttcctttgaaagaccatttgaaaattaagctctagaatattttcctctctgcaattaacatatgcactgacaatttaattttattatacttgttattctattgatgattgtagccaatatttaattattctaacaaggataacaatatagctattcagttcaagttgaaatatttaatatgtttgataaaaatgttactttatatatcgccaaagttgattaaaaataaaattaaaatatgcttaacatctttccctgtgtagcaagtcagtttttaagaattttatcaacaagggactacatatcaaattttccagtgaaattccactaatagtaaaaaaagaagcctctgactactagagaagatccaggcccttagcccacaaaaggcaatatctatgaagtctttatttaattttaataataatgcaaatttttattctacatataatatattttttatttattccttgaacttctagaatgggtcagactctgtttaagcccttcagatacagtagtgaatgaaatacaggaaaatttcttgtctcctagagattgcattctattttaataaaattaataataaaaacaaacaaaaaataagcataatgttgagtatgttagattcctataagatttgctcattttgacattaaaatgatatatgaattttccatatctgggaacaaacattttttttttcccctgctactccctttaggtaaattggtgggatactgtttctatgatcctgtcaggttcaggaaactggtttaaattaaatacttatgtcagatattcatttcagcaatgaggcgattatcattcttgagctgtcatagcattgaagattgcatacagtcatgtggggagagatgccatcagtttcctttttcactgcttgtaaaatacatcaacataatcactagtaagagatactcagaattaagtcaaagaagcagtacagtgcaatatttccaggctgtgttgatagaaattttgataagtatattttttgatgacaagttaagccacttgtggattatgatgagatgaaagggtcactaatcttttggtcaatcttctcttgtctctgtgataatctcataaaaggatcagttcagggaataatgatgagtgataatgccattaattttaaaactgatactgtaattttcatcacatgtaaattatctgagccttgcaatctacataatcaactctcttcattcaattttcaaatttcattttcattgcagcattttggtcatgtaccataaatatactgtttctttacattttttaaaaaatgaatcatgcccaaagttgtaagaatactttaatgggccaaatgtgcaaatgtctgtgttagggtgaacaattaacttaagttgttttacttgtagtttttaacctctgatacagcatcattttttcttcatggagaaaaattcttacacctacactttcttccagtgaaggtcagaagagcaaactgtccacattcatgcccatttgattaaaatggactaaaagttataattttggaaacttcgtatgtatataattcaactgttttatcactgaaataaacctattgagaaaaaataaactcttggagacaaagtataatttgagagtgaggctgttgttccttgaatttggaaagtggccaggcctagatgcagtgaaatcccctcatgcttctgcctttcatggatttcacatcatttgtgcacataactccattcatttttccaattaatgtcatattttttaataattaaaaagaaataagacaaaaaacttaccctactgatgttttcttcacatattttaattttaaatatttgggaaatgaagacatcataaaaaataatgggatgaaatggtgaatgtggcaaagaataaggaatattgttgatattcatcctttaatcccagaaaaatacagtatctagttaacctccattttcaaccagttattcagaaattatttctatgtattacattttatggtttagacttagatgaataacaaccccattttccgcttggatgcttcactttggcccaaagcagattcaaccaaaatattacagcactgggcttaaaaaattactcctatttcgttgattaagggagagggtgttctgggtttttttttgtcgtgcatttaaaaaaacactttataattttcaatactttattgttgtctcctgatttatattttgatgctatacattttcctctaaaaatccactatagctttatctcaaacattatgtcattttttggttattcttaatatcctttaaagagaaacaacaaactattgtgtggccaaagttactctacacaagtgaagggaaaattattgagaatatatttatgacataaatgacaaaaatggcaaaggatatgaataggcaatatctaaaaataaaatgtaaatagccgataaacacatgaaaagatgctccacctcattagtatccagggaattataaaatgcttttcagtctccaactggcatatgtaggagattaataatgtctagcactggcaaagtttcaggcaactaagctctttcatacattgctagtggattgtgaattactacaaacttgtggtgaattgtctagtaatgtatatcaaaatggttaaaaaaagatcctgtcattttcaccataatttatcccctagtaagagaagtcaccatcacacatgtacaaggatatattatagcattattcctaacagcaaaattctagggaaataaaactatgattccatcattaagaaaattgttaagtaaaatatgtaatattgagaagtttttggaattttatagtcatatttattgacctggtggtagatccacctgtttgtggtacacacacacacacacacaaagaattgctgactgatgtttttaagtaagtagaccccactgagaaacaagaagtacacacacataccccacacaaaaagctgcaacataaaacgtgttgtgtgagcatggaaaactatagaaaggtagtaatctagctcactggagtagaattagatgttaggttggagacagaaaattattgttacataactttgtattcagttcttataaaagggcatatattacttttgtaattgaatatattaagatttgaagttaaaaaattaaaccatttacaatatgcgtaattttcaacatgctttatatattggggagtatactgtgaaaggaaggaaggttaatagtatgtttgttactaaaacgttttttaaaggaagtggttttggaaagaagtggatgtattttgtaggagaaagttttgtttgctggttggtttaaccaaggtgtaaggaagtctgatttaaggctataaacttatttttcagaaaattgattcatgaggatctgcggaaatcacggattctagttcctatagtccctgttgttctagcattggccctgttcatttgatgtgattgaaaagtttatgttaacttcagtagtaatactcaagttcttttatttttttatttatttttttttttgagacggagtctcgctctgtcgcccaggccggactgcggactgcagtggcgcaatctcggctcactgcaagctccgcctcccgggttcacgccattctcctgcctcagcctcccaagtacctgggactacaggcgcccgccaccgcgcccggctaattttttgtatttttagtagagacggggtttcaccttgttagccaggatggtctcgatctcctgacctcatgatccacccgcctcggcctcccaaagtgctgggattacaggcgtgagccaccgcgcccggccaagttcttttatttttaagttacatgactgtttctactccgaggaaacacacaattggaaagaacacaatattgagtaacttgaaaaatctgactctgttgattacagttgatgagcaaaattttaaaacctttttccaaaatagtttccgtgaacctaatgttctaggaaaatatattctgtttttcacttgtctttgaatacccacaactctgagccacataccgttgctattatatctggatttatatggtttatataataaacctgagtttgatatgctacagcattaaagtatttagagaactggatttttttatctttgtgaattctgaaatgcttgatagtattagaaacatactaaacaaaatgcttagctaatttattataaagactgctgtctgagacttgtttttaacatgattactgagcttgcataaaaattatatttctggtctaatctgtttaaccagagaaaataaaagcatacttataatttttgatatttggatgaaagtcaaaaaattcttttttattttgtatcttctaaaatgagggtcaaaattttatatacttaataagaaatatagaaaattggatagtatcagatgataagcaacttgatatgtatttcagacatctgtgtttcaagtgtctgtgctgttggaataaaaaatagtgggtgccttagaattctattcagatccctgcttctatttgcctactatctgctatgttagatttttacctaattaatatttttaaaaagtcattatcacattcaagcatttggtttttcaggatggagagtttatgaaaacagagtttatcttttccatattgatctatttattgctaatacttacaattttagaattgataatcacttattattctgggaaatatgaattatttattcggttccaaacttttgaaataactgtctggtgttttagaaaccagaaacagaaattataataggagtttagactataatatattgctgcaaggataattattaagggaaaacacagctgacattttctgatttatgcacacaatcagagatggagtccaaggactgtgacataattatcttcatgctaacaatttttgtaaatctcttgacagaattttagctaattttaaaatgccttctgaagattagcacttaaaattgttggggaaaatagcacaatttattagcaagggtataattgtaaaccttctaaatactcattgtgaatatcatttagacagtaactcctgctttagcagctggtacataagacacccgtttatggagtcttgaaacaacagagagtggaatctaattaaagaggattacatgccaaagaaaaattattaaaaacagactaatagacaattgttatgaatttagaagtctctgccaaattctctttttgatacaaattcatgtaagtaactgtcaagtaaaagcctttattcctccaaaaccagaaggatattggaaggctttatcttttgtgacttaaaaatgattgcttctctgaattttaacttaacacaaaaacttaaatggttctattaatctttcctcatgtattaaaatgcacacatgtgcttttaaagataaatgatcatgaatactattttaggttttttatttgatatctatctagtaccaaccattccataactgtgtacagtatatggaaatcttaggcatattttttctttgtaaacaaaaatcagtttatcaatttaggcactatttattgagacttatgttaaattggcttgcatatttttctttgtaatgtacatttaaaattcatgatacaccaaagattgttaatttttagagccctaatctagtaaattccttgtttctgtttgaactgacccactccattgtgatctcaaggtttttttttccaatcagagaattgaggtagcttaaggtaatacatattcatatgttaattgttttttaaacaacgtatttttaaaataagtgatccttctaagtatgttctagagaaaagactgtttacatctgtgagtttacctggtgtctaactttaatcttacacacactgggtggtgttattacagtacatcatgcactgcattacacagccataccatctaaatagacttttctatattttaactagattaagcatacattaaaacttgatttccaaagactaagaataacgtgttttctgtgttactaataaatgcatgaacaaaatcactggattgagtaaatgagacatttaacattcttaagtgagtgatagtcctataaacatagatgaaaaaattaaccatccaaaattgagacagaggaacaccactgatgttcaagtagtaacagtggatttatttgactttgccacccgcaccccatccctgataccaaagttttcctcatttgcttagacaccacttagtctagcagggattgccagatgcttcagcaaaaactccatcaaggacaagggattgttttaagtttaaagcctctagattacatcaaattttttatccttatagggataatatcctagagagcagttgtgtagctgtggtttccctgtggtggtaattaatttagtggagatgggtcagattgttcagagcttaaaggtgagcaggcttccctggttgaaatagtagattttcatttttaaattgctcttggagagccttccctcttgtcaagattaagtgagtaagtaaattataatggcttccaaaatagtaaatatcaatatttgtataatagtttgtggttggcagtacatgggacatagaactccacaatatatattgaaataatgatactgtgtttcatttgattatcatgtaaaccatatgagactcaatcaaaatataaccatacattatgcaaacaaacgcattgtaattttaaatatgaaattatgattaaaaagcaaatactttatcctgaactttgttgacctctcatagatataggaatgaattatcagcaggtaggatactgtagctaaacttttaatttatctcaaaaaagtactaaaatattacttaattcttactgtgtatgagagatgaaatcttaaaatatttcaaataaaattaacatactttcagactatgaaggcagaaatgagattcattctatcttttaaaaatatgtaataatgtttgaacaatgtatatattttcacatacatgtttttatttactttaatctttacaataacactttgagtggataatattactttcatcatcttcattgataccttcattttatgaaggactatttgcagattgagatgttaagcatttttgtaagaacacataagctgtttagttgtagagatgaaactcaaaaacaaattttctctctgcatagctcctacctctcctactgcattatattgtatttcactgtgactcatataagattctcctagacagggcctgattgtaagctggccacaattagtgaaatgacattagctaaatatgattacctcttaatgttccctgaaaggattagactagttaagacacaccaaagggaaaagcaattatctattgaaatatgaatctcttgattagaactggaaatcatatattgacagtagaatgttcatctagaattaaaaaaatatgaatatagtaattatttcttacttgtacttataaagaacttcagcagggctagttttgagacttcttgttgagtgcaaaaattaagatacaacattttccagaaagagtaagttcacctaattgactcatttttttttttttagaggaacctagaccttaggaaattctaactacatgagaaatgcatgtacttgtattaccttttcccaatttactttatgtcctaaagaaaagctttgtagtaaccaacattgaactgccttagaattgtagcagtacatgttggagtgtgccattttatttaaatattcctcatattttaaaatatgaaatttatcattgccttcataagagtggtggtttcccttgtgataattctctgaggttccttcaaaatttagtatcctgcaggttttcaaccagctgagatttgtaattattgctgatatatcactaatacatggcaatggatgtgaggcctatttaccttataacagttaccctattgaattggcttttttttttcaaaataaggagttaaaaaaaaggttttaaaccttggtgtctcaatgattagcatactatctagcacccattatgttctaaataaatattgaatgaatgaatgaatgactggttttcatttctagcttggcaacaggattgacttttgtgtctttttttaaattagaaatttgatgtttgaacttaagatgctttattgtcaaacagcaatagaaatttgccaacttttggaccccttgtttcacaaggttcttggactactgattatatttgtaacttccgtttctaagctgtctaggtccattgtgaaatcatcctccctgatactaaaatttgttgcacatagacgttgggccatagatgggcttcaggagctgtattggcccactgaaattgtatatagcatagcatattgtgtacttgtgcatatgtacttttgtgaaaatgtaattttttaaggaaaaggatcatggttttcattatactctcataggagtcttatgaccaaaaagtttaaaaaaatccataaagactttcttttactttattattcataaaaatcacctggttaaacatgaaaaatgcacatttttttctatttcaccatataaaatctgatccattaggattgagttggggttcatggatactcttcttctgtttattctttcctctttttccacctttattgaaaacgtcgttgctgaatgtactaatggatttacatatattacctcatttaatcttgttgatagctctagaaggtaagtatatttcacgatgaggaaactgagttaattaacttgcctaaggacttagcctgtagacagtaatggtaaggtctgaggctagagccaattttattaccttagccttccccctttttttctcttaatctggaaaattgtaaatcatttcaaagacaggtttggaagtaacaaactcatagtcatctcttgttccaagagaattatttcctttctctcctctgtattcttactacatgtgagcaagttgaagtcttgtcttatttaccttcatatccctgtgcatagtattattcctgacatgtaatagattttcaagatttttttttctgcactgaaatttaattcattaactcgagcctttgttacttagtaattctgagacttaaactccagtagctatgccattaactctttgtgacttttcatttgttaaaattggtttcctaatttattcaatttaggtttgtatataaattttagatctgatttagttttagttatcataattataacataaaaattcagtcccatggaaataaagtcctgtggaattatcagtgatttgttttatttaataatgtaatttgctagctgttcttttttttttttttttctttgcctctttccacctccatccagaatcagtaggtgtttggttgaattttgtgattttttttggtataatttgagcaaagataactcagtgaattttatttaaaatcctcagcgttctgaaatctccttgtatattattttctttcatgtgactgttggtgttctacttgtttcattatacttttatagaatccttaacacagatgagatataaaacactatgaaatctatcacagttgaaactctagaccttccctcaacccatggggattcatttggcaggaggccaccaaaaccagttctttttgatgcttagtttccagtttctacttcaattgctgccaaaatctgaacacttgggaatttaattgctcattatatttgtcacggtggtgtcacagacccaaataaagactgttgcatgcaaaatatttatgggtattaatttggcctaaatgtgtatattggattccatatttttctacattataaagtatagcacttccagacagatgtagacagaatcctgcaagagcttctgctacatttgactctgctagtaaactattttccatccagctcagtatttaaatttgatgacacctagaggaaggcctattcagaactttattatattcacttatgcagtttactctttagaagcggactcgcgaggagtttgagtctggctctgaggctagactgcttgggttcaaatccctgctttatcccttgctagctgtataaccctgggcaagctttatcttaatctcccctgtggttgtttcctcatttgtaaaataggaatacatatggttgtcatgcagattaaatggttagacttcctagaaaaagtacctaacccagagtcactactcaatgttaactggtttactataattaatacacacacacacacacacacacacacacacacacacacacacaatacattatatattaaagctataatgtgtaccatggttgctgatacaaattgttccgaattttcagttttctaccaattaattagagctaacctgtgcctgttatattacatggcatgtctggtcggcattaaatttagtacctttgtgaccttccatttttcctgtgtattcccactttcttgctccacattgtctaggctagcaggcctgcgttttgttccagtattttattactaatcactgattatttttgttcttctgcttgctgttctcaggagtagtttgttcattcattctctctgtccccttttctctttttatctgttgccttttcctttcttctgctgtgatggttgtaggtttctcatgccattatattggtcaaaggaaattaggaggcacttggagggtggaaatcacaagccactaccatggataatttttttgaatttttatgaactttcctatcctgtaaagtaagtcccctatgtgatacttaccactgaaatcgtattctgggacagtcctatactaacttacagaatccccaagaatgaataacttgttgattacaaataatttacagtttttctcagatccatgttcatataaagtgggctgagaacagattttgattggaggccgctggctcaattttacctgcagttgtctttaatgttagagaagtgttattggtggtaaacgtgacagtgaatctgtttgccctttactcagtggatatttaatgcttacttttatttatgagaagtttgagcagataaagatgttagttgcttgaaatacttattctatatggcaagagcctaatattgtctgaaatataattcaaatcatgtgtctgttacttagtgcttctacatatggttcttgaagcataaaaaatagatttgatttcaatttctgtatacagaagtatttttagtcaaggtaatagttaactgtttaaatgctacagtgcttacttatttcctttgttgttctgttgggtataataaacttcatgcagacacaaagtgtaaaacatggagcatttgttcttctgttagttagcctaatactcattttgggtttcccattccacatcaaggcagaatatgccattttaaccacttcctgataaaattattattaaggttgccgcttctactcattatagtgaaggtactctgaaacacggtatttcagctaaatcagaaatttggctgtcttcaattcctggcatcactgagcgctcagtgtggctactcagtgtggctactacagtctctcagtgtccacgtgtccactttctctctctctctttttttttttttttgagatggagtctcactctgtccccggctggagtgccgtggcgcgaactcagctcactgcagcctccacctcccaggttcaaggaattctcctgcctcagcctcctgagtagctgggactacaggtgcacccaccatgcccagctaatttttgtatttttagtagagacagagttcaccatgttggccaggatggtctccatctcttgacctcatgatccgcccacctcggcctcccaaagtgctgggattacaggcatgagccactctgcccaggcttctgtctcttattttaatccaagaatgtgtttatctcctgtctctgtggctagaaaaactagatagtcaagtaatcttccaaccctgctgtttatgctaggaatggaccttaaaaaatttatgtccaataattttgttatttctttaattcttttatgaacttgttcctctacagtggtggaggcccaagtaaagttaaaaattgcagtaggatacacacatatgtttattgaggcactattcacaatggcaaagacttggaaccagcccaaatgtccatcaatgataaactggattaagaaaatgtggcccatatacaccatggaatactttgcagccataaaaaaggatgaattcatgtcctttgaagggacatggataaagctggaaaccatcattctcagcaaactatcacaaggagagaaaaccgaacacagcatgttctcactcataggtgagaattgaccaatgagaacacatggacacagggtggggaacatcccacactggagcctgtctgggggtggggggctgagggagggatggcattaggagaaatacctaatgtaaatgacgagctgacgggtgcagcaagccaacatggcacatatatacctatgtaacaaaactgcacgttcctgtaccctagaacttaaagtataattaaaaaaaaaagaaataaaaaaaagattgcagtaggattggcaaagaggaggaagctgatgaggaatttcagggccaaaaagaaacaaacaaaaaattatgtgtattttttcttaatggtctcaatcaacaacatttataactttgagaaagtttttaaatttcttaaacagcacacaaaaacactgtacttaaattagaaaactaacaaatttgatctcagctaagcagttctctttattgaaagacacttctaaaaatgtgggaagataagacagaagaggatacttttaatgtatatacccaaaatggactttttgaaaaatatataattttaattattgtagattcattttggtaatttcaaagattttaattataacaacatataactgtgtgtgtttgttaaaaggatctttgccttaatttgacttagttttaaaaaatatcaaggttaaaaatagtggtttatataccaatatatttcaaatcaattcattcttatacattggacattattaatataatttctgtaattttgtaaaattcaggatacttattcaagaatagaaagaacatattaatactaaaattttgtcatttagtttttctttctgtaaaaataagtaatacactaaatctagttattttatcaactaaatactagtaaattccataagaaatctagggtgccaaaagattcatatatatatgtatataaattgaaaatttctacaatttatgccctcaaaacctattcgggttctctcagattaagtgagttttaagtacgtataattatatttagaattgtagtaaaaattttttaaagtacttttagaaaattcagtctagtattgctattttaccaaaaagtagaaacacttatgaaatttaaactgcttatgtcatatttactcaatcttaaaattcttctaagaacctgatctaatctaattttcacctaattttaagattttaactttagtttcaagtatataaatatatatgtgcagttgtaaatattacacataaaattgttatttaaagatctgattataaaattttgattcaaaaattttgaaacttttattattatatctgtgctctatcccttcatcttagtcaatgctagcttatttagaacttggtatttattgtatactgtttatggtgatcaaaaacttaatggttttctcttttgagtttaaattggattttctatacttaagattattttagagaactaatttttattcctccaaacttaagaagttttcctacttttataaattcatttcttctgtttatccactttgaaaaattgataacgaaactccactttgaaaaattgataatgagacttctgtgacagctgtatcataaaatgtttttattttgttactgttggatttaactgtcaattttaatgaatgctacccaattaaagtggtatgcatatttttcatgagtccatgatcaatataatcaattacatttttgcataactgcatagatacaatttttctcaggatcttagagaattaatgcaatttttaaatatgttgcagaattgtgagaagctggagaataattttgatgacatcaagcacacgactcttggtgagcgaggagctctccgagaagcaatgaggtaagtctgggtcaccatagcaacagtcacagatgtggtaaagaaaaagtcattcttcattatttggggaacaaatgagttcattgccaccattcagctctgttctctaaggtattaatttgtcagtggagagacttcccttgaggctgtactttggttttgaagctgcataaatgttaagcctcagtgcacagtaaaaaatgtaaatgtttaatttgttacttaaaatgcttaaggggtgtcttgttttatacttatactaaactgtgtgattgaatgaaaatattgttcatctaaattctgcctgtatataaagaaataaacattgtacaatggtgctttaattgagtagtatttcctcctaattaatatttaatttaaagagaggtacttacattttcatcttctataacattttataggattatattatattatagtatttttagtgatttacatttttacactattacaaagcatataattaacttcctttcaactatagtggtctataatgagcctgactttttttcttttttcatttcttaacatcagtaattctgaatatttatatgaaattgccccaaatttgatgccttttaaataacttttagtgaagcatttttcaaatctatttgatcagaatcaagaaaggctttttattagacattgaaaatttgtgggaaataaaactcatcatccacagagtgagaaaacaacaaatgttagtagtcttaaaagttctgagcttgaatatttgagtagcataatttccaatatctttgtaaagaaagtgtatttatatttatttagcctataaaattaaaatatgtttttaaaatacgccttcttctatcttaatgctcatttttcaaggatgttaaggctaaagagattaaaatgagagaaaggataaacctaagagcttcctagaaaggtagtttagatacaattttgttattgctagcacacagttaccatatactttagtttagaagctgctctcatttagtaaccttccttttaccatgcaagcagcaggagaaagtaattaaatttaatagaagctgccctcattttgaagccacttctatttaaaaccacagggggaggtaattaaatttaatggaaacagtagcttctacacaaagatacatggtacttctgtatagatgattatgatgtcacaaaaagaggaataatatattactagtatgagaaattaccagctggagcaagtgagcctattttattgttaatgtctttactaataaaaaaaagagggaaaaataaaactgagtacacaatagagaatttgtatctatataaaatgcaatcagatattctcagaaagtttaagttattgaaaattttagcaaattaaaaataagttgtaaaatatttgttttggaaaaagctaatgcagaaattatgaatgaatttctaattttcaccatacatagtggtttatcctaaaattaccactgctataaatttaacattttttgtaaatgcttattatgataagtttaaatacagtaaacatgcatgccaatatttacttggaaaactgcagttattctctatatttttatatctatttattttgaagtaaatacatagacaaacaggaagacaaagagggtggcaactcttatgctttgaataaaagaactgaagaccaaaagacagaaagaactgaaaagaggcaatgtgaatgaaaaatgatgtgaatgaggaaaatacaaggaacaaggaaaggatatgtaatcagtgtaggaaatttgtcctcaagaaaaaaacaaattgaattataagaattaacttcaaatgaagagatgattaaattctgccaaatttcgttatacataacattttagaacataccaggatgtcctgttttttaaaaaactagagatgaactgatgataaaaacaagtattacctgcctggaataacttgccaaccacccattctatgagacaaagcagtagtctggataatttaagtgagaatttaattttatggcatgaaatgtacttgtttgcttaagttatacattttacttacacacacacacagacacacattattggtaatgtctggattcattaaacacagtggaataatttagtaattaatagcatacaacaatttagtatatggtgggtcaggtgctttttaaaatgtgttcggaatatgcttgaggtgaagacccagagactgagtatttcagtcttttccctggcccagaatatttcatggtagcttctctgttagtccattggcctggcatagcttggctatgggaccatccgtttttctttctttcttttttttttattatactttaagttctagggtacatgtgcacaacgtgcaggttagttacatatgtatacatgcgccatgttggtgtgctgcacccattaactcgtcattcacattaggtatatctcctaatgctatccctccccccctccccccaccccatgacaggccctggtgtgtgatgttccccttcctgtgtccaagtgttctcattgttcaattcccacctgtgggtgagaacatggagcatccctttttcttattagcttgatctctttagcagcccctaagtggctccaggtccccacagtggtgttcttgtcctgagtgtgtctagccaggagtaactggaacagagttggacccacatctgaagattgtcctattgtggctgcagtgttggggggcctttcaccatcttgggtacctccttatttatttaggttttactatttctatgagcttagaacagaaaagagaggattcttagccacctcatccagtctctctttctggccagtctttgctgtgcagtcttgaatctggtttcttgtcagtatccgagtttacaaatcactttagatccctcccatgcttcctcctgatcccagtcttgaggatgccctgagcctgtagccctggtgtgtaaaaaggacgaggggttacaaccttctctggaatatgctagctaaataaaacgttaaataaatacattaattgatgtagagagagagaaaaaaagaggattagtgaagatttgggttttcaggtgactgtgagatagctgaggttaactcgtgtaaatgtgcaataggcagagggaaaatacaatgcaacaactcaaggaaaagactgagagttgatgtgcgcatttgagacttgttagtattttgatacttgttgtagccaagggaaggcatatgatttccaagaatagtgcattgggataagaaagaaggagagtccagccagatgtctacgaaaatacagggcttaggaaaatacgtgccagaaaaaacatattttgggatttaaaattctgaataaccttctctaacagagtaagactagactgaaatataatgtgcctaagaagaaaaggacaggggaatggaattcctggccgtttttctgtggctcttagagacatctagaccaatgctgcccagacctttctgtgatgagagaaatgttctccatctgtgccatttagtgtgagagccctcagccacatatggccactgagtacctgaaatgcgatgagtgtaactgaagaaccgaatgtttaattttacttaatttttattaatttaaatttaaatacttatatgtggttagtggctgtggtttgttctgtgctgccctaaagggaagtttttgtgttgctaatatgacacttgactgcctctcacttaacagagttctcaacaatggagaggccagagtgaagctaaaccatgttcacacacatcacacatagatacacttactttcttagaaaactaatagtaaaaggtagatccataacctggtaatagatgtaaaaccaaaactaaaaagtataatttgatatagaggagacaaggtagctcttattttataaagacataatttatacctagaaagcccaacagaattaacaacaaaacctccctaagaatttgacatcttttaatgtgattgtattcaaaatgaagatggaaattcttaagttcttctgcgtgttatttaaaacaaatagtgtctgtaattgataatagatactataaagatctgatgaagttattatatgatgaagtaccccaagtagttcaggacatgttcaatcacccagtaaatggtataaaaggttttttttgtttgtttgtttacttgtttgtttttgctgtttggacaaaaaaaaaaaaaaaaaaaaaaagactttgtagtctcacttcacatggcccaaaggaaatttcatgcatttttaaagagctaagggaaataaatgaaacagtcaaagtccagtggaatatagaagtgacttttgagattgagatgggggaagagatgatacgctaacaagtaggtgaagaaatcactaagctttgattccaataataaaaaaaaaagcttccgtcatttgcaagaaaatggatcaacctagaaaatgttaatgttaagtgaaataagctaatcacagaagggcaaacactgcatgatctcacttttatgtggaatttaaagacgttcatctcatagaagtagagagtagaatagtggttaccagaagcttgggagagtagtgtggagtggaaatggggagaggttggtgttctatagcacagtaaggtgactatagtcaacagtaatatattgtatactttaaaataacgtgagaaaatttggagtgttgtcacaggagatggagactatcctggctaacacggtgaaaccccgtctctactaaatatgcaaaaaattagccgggtatggtggcgggggcctgtagtcccagctattttggaggctgaggcaggagaatggcatgaaccggggaggtggagcttgaagtcagcagagatcacgccactgcccttcagcctgggtgacagagtgagactccgtctcaaaaaaaacaaaaaacaaaaaacaaaacaaacaaacaaaaaaagacaagtgtttgaggtaatagatatgctaattaccttgatttgatcattacacaatctaatatgtattgaaacatcacactgtatccaataaatatgtgcaactattatgtgccaattaaaaacaaacttattttaaaaaacttatgcaaatggggacaatcacaaaattaaaagacatcaatgtactatattgccatatgtatgacagattttaaaaattgggaactcagtagataattggcaaactatgattaagtaacccttggaaatattcaactctaatggcaaacaaaaagtgtaaatttcacaaaaaatacaccaatctcttgcttattgctgctaatgcagtttggtgggaagtttttgagtgctagagatggaatagcgagacagccattctcacagatggctagagatggaatggtgagacagccattctcacattctcagaggattgaaaattactgctgcatttaaggaaaggattgtgtcactaagtattaagagacttaaaacaaacatacttttttttgtattaatttaccttctaggaatatattatgcagaagccatagaaattatgcataatatgaatgtgatactcaaattatggaatataaccctgaacaaattttacaggaactaattgtctaccattaagacaatagacaaggcaattatatgtatataacataaatatatataaatgtatatattacatataaatatatattatttatatattcatatttagaattttacaatatttataaatttataaagtatataaaatctgtgtatatatacagatatataatatatttatatttacagatatatacacagatttacatatatttaaaataaatctgtgtgtgtgtatatatatatagagagagagagagaaacaaaattgcttgtagaatattatctcaactgaatataaaaaatgcagagaaaaaataggaatgaaatgtggctattacatctggctggttggcgtaaagataattttttgaggcgtatgcttttccattctatattttctgtaatgggaatatattatgaataattagaaaaacagtgaaggaaaaatggagaaaactaaaaatatgaaataaatactggaatcaatagtaagaatcagatttgagactccaactgtaattttaggtaaattaattattttactcttacttttttgtaaaatgggatttaaaatctcctaggatttatatgaggaactaggatatagaggagagaatgctttgtaatttatgaaaattaataaaaataagatataaaatataatgtttgtatacatttttccttttaatgttgtatgtgcttacaagaattacatgtgtaatgtataaataatggaattcaatggagaagttcactgcagtcttagcatatagaatactagaagctgtatatcttgtccaacttctacatagtctattgtagtgccatgggtgtggaaatcttatacagcatttctgaaaatgataatcaaagaaaaagcattttaaggacaggaaaaaagtgcatcatctctaggtcaaatctctggtttatagtatgataatgaatttagaggtaaaattctcaacttcttttcatcatattctttctttatcttggttgattcaactctgtaatcatgccaaagggatttgatttctttactatcatattctgtacctattttagcccctgtgataaatcctgaacagtaaagggaaggatggggccacttttaacattgtgttgtatttttttttttttttttttgaggtggagtttcagtcttgttgtccaggctggagtgcattgttgcggtctcggctcactgcaacttccgcctcccaggttgaagagattctcctgcctcagcctcccaagtagctgggattacaggcatgtgccaccatgcctggctaatttgtgtatttttattagagatggggcttcaccatgttggtaaggctgctctcgaactcctgacctcaggtgatctgccctcctcggcctccaatgtgttgtctttttgtcccttttcagtctcacaggcagtagagggctatgggtaatagatatatgcaattggaaggtacttgaattgaataacttgagaaaaggtgacgtcagattctgaaaaagaagaggtacatatagaatatactcattaataaaaaaaataaaaatactattgggagttttttacagtgtatttcttaatacacataaaatatagattgttaatagatttatgagtatatctctatggcaagaatacaaattatttttggagtgccaacattgccattaggcattgttttatttgcagagcgaagtctattcagtgagatctgttatatttacattagtactataaagatgaactaccagtacagaatgtctctgaaatgtattctttttcgcttggctttatcacgtgttaagaattttgtcactagatggtgatgttgagttgcacagtttatctgtgctggcttttttactggtgtgtgtatactatttgtaggtgcatcataaacagccatttatacagagttaaatataaaagtatagccatgtaaacttggaaagtagcttttaagaggtctaacatttctaaatattatttgagtcaaaaggttaaaattgctttaatgtcattgtttctttaccttcaactcaaggacttttagaggtggaagcaatataaatagcaatctaactttttattgaaaggctgaggtccgaaaagagataccaagacatttaaaagaggtagtttttcagcttttcaggtatgtcccgtctgtgtgtattagcctaatgtatgtctttaatttcactcctctgttagtattcagtagtactggtgttgactaccatctgacctaagggttgtgttactactggaacctaggtattattttagctgtttatgatttgggttatgttaatattgcatctgttgctaaatataatggttgaattacactgatactttaactgatacttctacatgaaccatgactccgaggaagctgtgattagtaaaccatgaaccgagtaattttgttcctctgaataagatttaaagataataatatggccattattctactttatcttattcttagagatttgtgtgtgtgcatgtgtatgcatatttctatatgtggtatgtattatatagatattacatgtgtgtatatgtatggatatatttctctataaaatctcctctttgcagtcaaggaaaacttgcactgtgacagcatttggagtttggacttcccttgcctttcaggtgtattcattaggattacaaagatttaaggaaattttatggaattcttttaaaatagttaaaaatggaagagtggaaggacaaggcatgctaagtatttgagattagcaaattgattaagtagtttacaaagtaaatataaagctatgagggaaaaatcaaagtggcattgaagaagaatataaaataaataaaatgagaaagtattaacaaaatacttccagtgaaattagcaggttgtttaatagtatggaaagtaaataattttttaaacattctgaaaatgttatgtaatgatggaagtagtaatacatgatttaacgtttgtaacttttttttaattttcaaagtgttgaaaaacaaattcctttataatcagaaatgcccatgtataagggtatattttaactacttgaaaagtttgagcagtgagattggattcagaagcaatgtttcaactcttttctattttaatcatttctaaaattctatcttaattatgtttttccaagttttctatcactaaatagatcagcaggaacctcctgaaagccctactccccaaatcagcagagaagagtattctcttgtcttctatgcacagagaacatgttatctttatcatttctattacagaaaaacacatatttcaccatgtccagagcaggttctttgatttggtttatgccacctaacacatgaggaagtcaatcaggatgagtactttcagatttttttgaaatcaaaagacaaaagtgcatgattactttacataatcatgcacctgccctaataaatatcattgaaatacaggtcagaaaatatatgtaattagtcttatgtaatttttgtaatgtatgtgattaatttcgtgtaccttgagtaatatgaatgtatgtatatgtctttatacacctatatacacaggcacacacatggatacacacatttggtaatttatataattagtttcatgtacattttgtaatatgaatgtgtgtatatgtctttatacacatatatacacatgcacacacacggatacacacatttggtattatctgtttgccatgtaaattaggaatattacttccattcattcactttaggagtgagtgaaagcaagatttgacactcagtttccaatctcactgctcaaatggcccaaatataatttaattggggaaatagaagaaaacaattatattagctgttaccagtgtttagtaaaatcaaccatatggtcggcaacaatgcttctggattatttatggatttgttattaactgtcatttataaatacagaattctttcaatttagaatcttttccttcactttaaacttgaattagaattcaaaggtgagaaatattgattacataattatcaagtacaaatctggtgaaacagtagaaaaaatgaaatcagttaataggctaacacaattaattgttattaattatttatttatgaaatacattataatactcattaatctaagcattggtttgttccacctggtgcctagtaggtactaggtgacatttgttcaaacatagtatttgcagaaaatatcaaattaatattgcaagtgatagtttgatatttttggaaagataaaaccagaaaagaaatatgtaccattgatatacagaatgtatctgtttgaaacaacagcattggcaacagcaacatgagtaagaagctctgagccaagcaaggtcaggaaaaaactgcattttccccttagtatcaaaagattgtatattaaggactaggaaagaagggatgcagcttttgttttgctaccaaagaaaagtgcagagctaagtcgttactctagaatgcttatcattttagatacagactttgaatgagcagctaatagctaaaattatttaggagataaaaattggtactgtgaggattagctttaattttaagtatccataattgaagtgccacattatgattttaatgttatgataatcttgttaacaagctgttgtgtatatactatcatattttaatgtagttgcaaagcttaagtaaaccttaaagtaaattgctttttgaatcaggcttttacaagtggaaaattagtggtttacatgttttgaataagtattttgtaattatatttgtcattttctacaactaaagaagactaatagaatagatttacagataatattgtttataagcacgttggcattttttattactcgttctaattatttggtatatatgtcacaatatactataataaaatagctggccctatgtttttttgtaagtcatctcttctggaagatagacattgacatttagttataatatttctcatttctcatatatcagcttgttccatttagaagataattaatacaatttcttatccagcatttctacaggttattatgatgtgtactaaataccttccattgaaggtatttgtgtttattttattttggggaaaaaagtctcccattctgacaagttgtttttaaaaaatgtgttgcctcttttgaaaatcgagtagaagtaaggaaacattttattgtaaaaggccagatagcatgtatttttagctttctgggctacataatttctgtcacaactattcaattgtgctgatgttgtacaaaggcatctgtagaccatatgtgaatgcataggtgtggctgtgttgatgtggctgtgttccaataaaattttatttataaagacaggcagccatctggatttagcccttgtgttgtagtttgcagacccctggttgagagcaaacatgacttaagtccattagaagaaatttcaaataatgtttggagaaatatattaagaatttgtgattttctctgatagattaatacaaatactatgaagtccttccaattttatcaatgaacatgactatataacattactgaggtgccctatctactaatttctaggctgttctttgaaattgaataagtcacatttcctggattactctttcaagtaattagtgtgattaggaattaaacagacaatctagcttgtgaaatcaccaatatgcaacaaacatgagacataggtactagtgccactgaattaactagcattgattattcatgtttatgttttatagttaaaatgtggaataaccaccaatgaatcatttacattatgaaacagtataatgttgctcttagttggacaattagctttgtatagtatggtacttataaaaggacaacattgtgttagtttatttatgattcttttaagtagatgaatcatggtatctatactaaggcatatctatgatatctgctaccgattgaaaaaatattgattgtggtctattattttaatgcctttgtaagttttatacccatggaattatctaaagaattacttttattaaaaatttagtcaatgcatatttaataaattagtgaatcttgaatacttttcttgtagtctacaaagagggttttttgtttttgtattttcttttttttttctctttttttgagtgaaaggagatggtatataggatattctaagctccatttaaaaaatgtgtttggcacctgtagtcccagctactcaggaggctaaggtgtgagtaccacttgagtcacaaggagtatgaggctatagtgtacagtgtccacacctgtgaatagccattgcactctagcctaggcaatgtagtgagaatccatctcctaaaaaaaaaaaaattaaaaattaaaaatgtaaatgttcttggtgttttattgatgtgcaagatgttatttggtgacagctgttgtgatatgtgcagatatgcagtgaactgggaataaaccctaatttcaatggcttcatatggtggctggaaaggccttgctcctgtcaaaggccaacaccttcacttgtgatctggatcccatttcctctagtcttttcaaaagtttcccttgtgtaattactctctctctcctgaaacgttaatttttgcttttacatggttatttacatcttcatacttgcatattgtgcatcttaaagacaaacaaataaatgaaacctgtctacattttcctctccaggtgccactccattttgctcctcaccctcaaagcctaatgaaagagttgtcaataaaggtttttcattttctaatctcctggtctcaccttaatccactccacctggacatctcttgctgtctgttcagtgagagtgctctgtgttgccaaatctgtaatttgtacttgactggtctgcagcatttgcttcaattgactatcctttcttgaaacatttttcctcctaggcttaagttactttacatcattttattcttcccctgcttcattggccactccttttaactctccttggcagctatgtcctcctcttttcaatgtctaaatattgacatattataggacataaaattggaatgccttgtttctactattttctcctctgttcctaggtagttatcatttctttccttagataaccatctatttgatgataactgccatactttcatctctacttttgatgtctcccctaaaaaaacttcagctttacacttcaatgagacacttgacttagccacttcagtatgtaaataacaacccaaatttaacatatccaaaggtgatatctggatctggacttcttttcttttctcttctcttctcttttctcttctcttctcttttctttcttctcttttctttctttctttctccctctttctctctctctccttccttccttcctcctttccttttccttttccctttcccttttcctttcctttctctctttgtctttctttctttctctcctttctttctttctttctttctttcctctctctttcttttttttttttttttttgagacagggtctcactctgtcgcgtaggctgtagtgcagtggcacgatctcagctcactgcatcctccccatcccagattcaagcaattctcatgcctcagcctactgagtagctgggactacaggcatgtaccaccacacctggatagtttttgtatttttagtggatacggggtttcaccatgttggccaggctggagattcctggatttctcaccacaaccctccactgaaccaattcatccacaagtctttctatctgagtaaatggcagtagcatcatctttagttatttgaactacaaatctggaattcgtggaaaaaattttctctctcacatgcgcatctaatcagtaagaaagttgtataaaaattcctgttaaagctatatccttggaatctgtccagttttgtttctcccctgctaccctccttacctctcatctgaactactaatttccctttttacattctttccttaaaaatccattttccacagatcaccaggatgaaccaaattgtgacctttctctccaaaggcttgctattttacttagaataaatgacaaattccttactcctaacttgtcttgcaaaaacctttgtgatcttcctctgactcattaaccatatgtctaacctctttcagccttgctcacaaagcttctgaccaaccgtctttccatccctaaaactttccaggcttggacctgatgcttacctgggctccttcttacatgggctcttccatgccttgctgcttcttgctattcagctctcagcttcagtgtcatcttttccaaaagagatcaataaaggttaggtgaataaaaattgaatgaaagaggtaaagtaatttgggcatatggcacaaaattgaaggagccagaatttgaacccagactcattcctcttgcagaactcattacctctcagaaaattttaggggtgtgtgtgtgtgtgtgtgtgtgtgtgtgtgtgtgtgtgtctgtgtgtttcctatctaggccatgggataaaagtactttgtcagtacactttatgcacatattagagaaagcttcattaaaggaatacaggaataaaataatagatatcatgaaattatatacagatatttaaagatcagtcttcctaatgtttcccaaggggtctaggaaatttagtttaatttagtatgttttctaacttcaggcttatagctctgtcccactttaagggacattattttggctggggaatagaagtaatagtagtaattttatttagagatcttccataacatcaatttttagtggaaatgggtgtttgtcattggaccacagaggtaatactcttagttgatatctgtgctatgtttacaaaccaattatcttgctagcatctttctctatctttcaggagagtttagagtaattcttttttttcttttagatggggaaagaaaaatgatttacaataaggttaaattacttactggcattatatttgtcattgtcatattttttcttcatatttcatttcttcatcctcttagatgatgtttataatttcatattctgggagggaatattgcttgagacatttctcacccagaggtaagaattgggttgaaatttaaacagcttggatgaaaaagctgtttggggaatcagattttttttctttttagtagtgaaaaaatgataagaattttcttcctgtgaatgaaaataattactagttttgacacataattaaaggtagatgattgcatatgaggaagctatattaaataatttaaatacattgggtagccagttcgagccagtcactaccattaactgcagtctgaaagttgttccttgtatggggcattccaccaaaatgaaagtctattgttctttggcattaatacaagacttgtcctgcatttcatatttactcgggattataatctgttcatctgaaattttttgagaattgattgttctttcagtacttccaccaaagtacctgtctgtttttaaagagcatgataaatatttttgtcacacatatttccatagatgacatagttattgcagaagggtttcttgactatatcaatactaacgtatactctttgaaacctataattaatatgagcaaactaataatttctagacatacctgaatcattgtatgcctgtgattatgatttttctgcttgtttataaaaacaaatacattttaaatatgatgatgcccagaaatagagtattttttaaaatgccaaataatttaggaccatgaatacctctccataagccaagttttatattttgtatcctcataaatatatagcatagtagataaatttgacttgactaaatctagattattgtgttactgttagggtactcagtcttaaaaatgtactttggaaaaaagtccttagtgtttgaagacatacataaatattatacacacacattccttgcaccatgattcagattgaatatttttgaatggcttatcacatttcaggtttatctctaattatacagaaagtgattgtagttactaaaaacaatatgaggcaaatctttttctgttcttgatcattaaattcagttaatttatgaggcctgtcaaataccaggcacaaggctgggtgctaaggtataagaatgaacagccctcaattcctgctttcaaagcttagtgcctaggggtagatttactgtcaaaagaggtggttttttgaaagtatttagatggaagccagtgatgtgcataaaatgttttaagtcatcagcatgcatttattaattctaaaatcatgagggaagattaaagcaaaaccagtggggaagaagcagtgggtaaaggaaaatctgaaaatagtcacagctatataataactgatgaggaaagaaagaagttatcaccagaaagagatgactgttgtattgttttctaaaatttccacttatagtgattttctaatcttaatgataccttcaaatgtgtatgtatcacttttttatagttttaaattaatttatttaatgacctcagactctttatctgtgattgataattaaagggtattaggctttataagaactatttatagctaagagttacagtgcactatcatatacactttgaatttcagcctacaatttggagattataataggggaaaagttatgtatgtttgcaacatgattatgtattttaatatagttttaaattttagtatgtgtattaagatggaattaagaatactgattgattgtaaaactgaagtttcgaaacaaagttattttttatgtgcaaggggctgagatctaatctatgacattttagaggttttctttaagaaagaggggttattacattgaaatatttattgttttgagcaatgtttgtatttgtgaatactactagcatttatatctaagggatgactctagtttaagaattatagtgtaaggccattgaaggcacagtggcattgaacatttgtggagatactcttacacctggtttagtctttcaaatatttattgagttcttacatatacaaagtacaagtagaaactggagatacagttatgagcaaattttcatgagctttatcctcatgaaaattggataacgggcaggcaggtggcactgatcaaataaccacacaaatgtatataaaattgtaactaagataattctacaaagaggaagaagtgttgctaagagtgtaaattataggaagatttgacaggggagtcttcaacaaattataggaagatttgacaggggagtcttcaacaaagagttaatcaagctgaagtctgaaagaagggtaagtggatataggctaagaaaataggccagtgtataaatgagagttttctgatgtaaagtatttgtgggcatggggtagatgaaagtaactgaagaccaatatgaaaaacgcagagggtacggagttacattgtgggagatgaggttgaagctataggtaggggccaaccttgggaaaccccattgagaaattttgtctttatactaggagtatttcgtattactaaatactctctatactaggagtatttcgtatactaggtaagtatgtaaaataattaagcttttgagatatatcaccataattgtagaatttttaaaaatatcactctggctgaaataaaaaggttcagaaggatctaaaatgaatacagagagtctgcatgggagcctgtcatactggttttggtaagagatggatatgagagctctaatatggatattagagctcaagtaatgtgcagggattggagagatgtttaggatgtaaaatgtgaaggatgggagaagagaattaacagtcaggtctctggtgtaactggatggatagggaactgtattggtgagagtgtacattagtagaatgtttctttgcaggtttatttgacaatatcaaatttaaatattcactccctttaatgtgtaattaaagggaaaataggatgatatgctatataattatttaacacatgatgctgttttctcttcacatctgttgtattaagcgagatgggtaagtgccctttttatttcccgttgatgcttcttttttttttttttttttttgagatggagtctcactctgttgcccaggctggagtgcagtggcatgatctcggctcactgcaagctctgcctcctgggttcacaccattctcctgcctcagcctcccaagtagctgggactacaggcgcccgccaccacacccggctaatttttttgtatttttagtagagacggggtttcaccatgttagccaggatggtcttgatctcctgacctcgtgatccacccgcgtcggcctcccaaagtgctgtgattacaggcatgagccaccacgcccggccggtgcttgtttattttacctttctcttctggaaatctataaaatgtgattcccattatatcatattgcctgttacccatccttcctgtagacacctatggatcctttggtcacactcctcattctttataaagtttgtctctgggctcgctttgtccaacttttgtcctgattctttgttaattcaataacctacatagatgaggcgttcagtagctggcctctattccttcaattcttctccagtatttttggttctccaccttaacccagtcacctactctcacagttacctcagacacttaattctgtgatattgtgtatactacatggtacctcagctatcctgcatctccctgtgaccactgatttgtcttgtagttcaacagaagttagcttactcccaaattttaggtagtccttgactcttctagtcttttttaaaccatccctcgtattctacactcagtcaatcggaaactattgttgactctcctttaaaaatatatccaaaatattaaaagactgacagcctctaagactaccacttcagtccaagccaccgtaattgctggctattgtaacagctgacatcttgggctggaggtgtggtgagggtggttaacagaatcccaatacaaacttcagatcaattaaatgagaatcacaggcatgcatgaatcacgtgtctgtgtgtgtatgtgtatgtgttggagaggtagcagttagcatcagtgtttttgaagcatcccattgcagataatttcagaatgcagtcatggttgaagattactcttgtaactggtatccataaagactgttcttcacacaggagcttgagtgatcttttaatttggtcaaatcatatttctcttctgttcaaaacccactagtgatttcaaactgcacttaaagtcaaaattctgacaatgccctatgtgatcctgatcccctctactgcctccatgactttatattttagaactcaatttatctctcatatttagccatactggtctaaacattgagaaattaacacttcaaaataaccataggtcagaaaataaataatgggaaattaaaaaaatattttgaactgaacaatgaaattaaacatgaaaacttttcaaatgcagtgaaagagtcacttaaagtttatggcctctttggaagacagtttggcagtgtttttacaaaataaaattactccatatatttattatattttttaaagattatggatatataaataaatattttaaataataaaaagatataaaccccaatttaagacctggtaagattgggaacaaggcaaggatgttcgttctgaccagtgctttttggcatcatactggcagcactagctaatgtgatgagaaagaaaagaaaataaaggtgtacagtttgggaagaaataaatgaaactacatttgtccacagatgacatgattgtccatgtaggaaatcctaaaaattgaccaaaaaatttcctagaactaatcaacaattattagttccttactaataggcaaggttgccagatacaagattaatatacaaaagttaattgttttcatatatgtcagcaatgcacaataagaatttgaaatttaaaagataatatcatttaaattagcaccaaaaaaggaaatatttaataaatctcataacataggtacaaaatctatatgaggaaatctataaaaatatggtgaaagaaattgaagagaaacaaaataaatggaaacatcttttgtgtttctggacaggaatactcacaattctcaagatgttggttctttccaaattgttccacagattcagtgtaattacaatcaaaatatcaggaggttatatcttgcttatggacaaaatgattccaaaccttatatagaaaagcagaagactcagaataactaacatatattgaaggagaacaaagtctgagaattgacagtacccaaatttaagacttactgtaaagctgcagtagtcaaggcaatgtggtgttattgaaaggatagacacgatcaatgagctggaatacagagcccagaaataggcctacataatcaacttgtctttgacaaaggtgcaaaggcatttcaatcgataaatgatactggaaccactggacatacacatgctaaaaaaaaatctagacacactggacacagatctaacacctttcacaaacattaactcaaaatgaagtgtagaactaaatagaaaacacatgcctactatattctgagaagataacatagaaaatatagatgttattggatttggtgataacattttagatacaaatccaaaggcatgatccatgaaataaacaattgataagttagactttattacaattaaatacttctgctctgcaaaagacactgtcaaggaaatgaaaagataagctacagactggttaaaaattttatgaaagaaacataacagataaataaatgacataaaaatataaaaagaagcactaaaatccaacaataagaaaataacctgattttaaaatgggcaagagatctgaacatacacctcatcaagaaagatatacagatggcaaataaccatgtgaaaatatgtcattagggaattgcaaattaaaacaacagataccactacacaattaggatggccaaaatccagaacactgacacaaccaaatgttgatgagaatgtggagcaaaagggactgtcattcatttttgctgggaatgcaaaattagtaaagccactttggaaggcagtttggcactttcttacacaattaaacatactcttactatccagtccagcaattgcatttttggcatttacccaaagtaattgaaaacttatgtccacacaaaaacctgcacacggatgtttactgcagttttattcataattgttagactttgaactaaccaatatgttctttagaagatgaaagcctaaataaattgtggtacatccagacaaaggaatattatttagagttaaaaataaatgagctatcaggtcagagaagacatggagtacagttaaatgcttattactaaatgaaagaaatcaatctgaaatgattacacactgtattattccaaatgtatgacatcctggaaaaggcaaaactaaaagacagtgaaaatatgaggggttgccaggggtttaagatgaagagatgaataggtgaggcacagaggatttttaggagagtgagaatacttcgtatgatactatcatgatagatccatattattatacatttgtcaaaggccttaggatatacaacactaaaattgatttctaatgtaaactatgaactttgtgtgataatgatgtgtcaatgttagttcatcattgtaataagtgtagtactctgattcagaatgttgatggtgagggagtttttgcttgtgtgggggtagcagaaatatgggaactctgcattcctttgaattttgctgtgaacctaaaatattctaaaaaaggaagtatgtacaatttttaaaaatagtcaaaatatttgagtaaaaaatgtcccaaaagatgatatacacacatccagtagaaacctgagagtgtgctcaacatcattagtcatcaggaaaacacaaattaaaacgacagtaacatactattttatacccacttgtatgatgaatattaagaacactggcaaaacccaaattttggtgaagatgtgaaacaactgcattttcttctagattttactgttattgacttctaattttcttccattatggcaagaaaataaaatgtgtaagattatattttgaaacttgatttttgtccctgcatgtggtctattcttggtgaatgttttgtgtgaacttgacaaaaatgtttattctgcaattgttggatttagtgttctataaatatcagttagattgaggcaataggtagatttatctagctcttcagtatcattactgtcatttatttatgattctgatagagggttgctaaaatctccaactatgatttgaatttggtcagtttttttctttcaggtctgacagtttacattttatgcttctcctgaaccctcattcattttgtttatttctgtattttggaagcttctagcctctcttttttagcctcccacaaacctcttgaattcagtatgtgtccagtggggaaacagatgtgtttgttctcttaattttccaattataacacccctccgcctgtgccggtgatcattaaacgttttgctgatttctccttagcccattttaagaaagttctcctctcttaggaacttttgtttgtctacttctccttgctttctcagatctcttatgcctctaaaaaatatggtgttgtggtttatccagctttttctagattttagcagagagaacattcactggcctcctgtgacttactacattatgcctagaaggtgaaattcctttctgtgtctacctcagcacattgttttggtaatcaaagtcatggattgattgaatataagcaactacatatcattatgtttaaaggaagacaaaactgtgctttttaaaataatttactttctgttttgtttatttcaagcaaaatatttaacccactgtcttttttcccctatattttctttaaaatctggacacgtaagaaagtttcgtgcctggtcctgttctcactctatgttcatgttctattctttggctcttatccactgtgtgtatcagtgtctctcaagtctgtgttctctgccctagtcaccctcttgaatctcaaacttacagttttaaatgtttgtttgacatttgattgttcttcaaaaacttcagactcaacatttcaatccccaaattcatttgctttgccttttagttggtctcctacattcccagggttctgcatctggctctgtcagtgggactgactgtaatttttagtaagcctctgaatctctgtgatccttacttttcaatttatatttcatttaaacgaatcaaaatgtagctagattgcttgttttaacaaaatattttatcaagtgcaaaattagtatttatcttttttataaaaccataatagaattgcagctacctcatatgtaaatgaaataatttattactttggtaagaattagttattaattggtctagttaaataataattaaggataactttgtcctgtcaactcagttcaatgctcaaaagaataggtttacaaatcctaagagatgaagttaaattagttttaattgagctttttatgtgaccacttaaacacttacctatcctgaagtgtctgtttttacagctagaatatgcaacctgttatcttctaatttctttaattccctcttttctctggagagagttctgtatcattgagtatgctatacttgggtgaacacaatcaaatgactttgactttggtgtaggaagataaatatcaatgacatactgtagggatagataaactcaaaatacactgtagaatttgtctaattaatgttttatgaaataaatgttttcatttatttttcttaatgaaattgtatagcatcttaacatcttgagacttcacaaatagttttaggactttatattatgggaagtaatttgcatgattatgtttaattcctttcaattgtttcactactcacaagcgtgtctatttctgagaaaattctatatgtgtctttatgtaaagtaaaatcttttagtattcttgtagtttgatccttagtaagtggtgataatacataaagaacaggcattatttatataaatttctaaattgaatattatatcccactacataggctcttgtttttccctcagagatattcataacaaatgagaataagggtcaagaaaaataacgtttaatataacaacaaattttgtttttttaatagactgtgatgagacttttcattattcactagaaatgaaatttcattgctatttagcacaattgttcataaaactacttcgatttaaaaccatttaaatgaattgcactgcttcagtgacaaaatattttcaaagttattttcactttaaaaatggtcttgatattttaagtccaggtacatatgaggtggagttgccaagtattttctgaattaacactttaaattcatcaataaagatatcagcacttttcataaaagttatttgctttggtaaaactaaccatgtaacgcatggtaatatataagcataatgaaatataaccctaagtcatagtttacaggagtgaatttcaagactgctttatatacaaggaaattttaacttttcagccatatttcatttaataatcagaaggggaactttgtagtcttttaataatgaaatatatgctgttaatctttttcttaaaaaattggagaagtcacatttttcaaaatatttctcatctctctgttttttgtgtagtcccatttcatagatacttggatagaagtatgtgtgtccatattttcattctctgaatatacattcaatcatgtaattaagagcaatcaccattatcagtaattttaaaacacctttttgattaatgtctcaatttttttctgtcatactatttttacccatgacaaatgataattcaggaatatatgtaaaggaagagcatgaaacaagattattatagtaacttagtgatatattataaagaagagtatttcctgtagggtagtccaattacaaaatagtaaaacaggaacaaaacacaataaagtgtttttcctatttgtttcagtaagtttagcacagcaggagtcgtggcattcctcctgactggtgcgtcaaatcggcagtttgaaatgtaactgcaaatgggaattattttaaagacaccatatataagctaataaccttagccatataaatgagataattatacagtatttaatatatttagtttcttttcattgtaataatttcataccttcagtttgagagaatatgttcattttgaaagattaataaacttttatgttgaaggcatgtaagaagtaaactttgaatcatttaaactttgcctgtatcagttttttgctggtatctgtttcttgccagttcagtttagtttgaggaaaagatgttgtgaattaaacgaacagcaaacatcacaaaaaaattgacataggatccaatagaacttttgaaaaatagtctgaaattacttcaggacaacatcttggactatagcataggagaaaaaggattgattttgtggatttgtggaaatttgacacttttaatggcaagagatctaggttttagaaagttcaaccaaggcaagaaggataagtgggagaactgggacttctatactaagggaggataagatctcaaaagtcaggtgtctcttgacagtgaatcttgaaaagatatagttgggagtcttggtaaaataaatatctgagggatagatctgaggccccaaaaggaaaattgtgctttgagtagtacaagctgcttctgactctgtggttccttatatatttcttattgtgtaagtccaaagttcctactgcagaagaggtgaccctaaaacagtgtgagaatgtgctgagtgattgctggtagtatggagcattatacagtctgcaaatgtggagactgtaaaatgagttcagacaggaacttttagtcttgccctctgacattttggcagttcttattcaggcagaagaaagatttgtcttaattaaggcttatgttcatatgttcataattaaatagttttaaaaacctgaaagaatttgctagagccaactgtcagaattgtgctgtatccaactacaaatttatctggaaggcatttcactgccaagctttttgaatatgtagtctgaacagcgtgactctacgtctttacctcccagtcatacctcaacccactacaatctggcttctttgcatcattttttctgttagacatagtgccctttacaaagtaaaagctcaattgatatactgatgaattttaattttaatttcttatttatattttatatcctacttctaaaatattaaaaggagatatgttaagtttgtatgaaaattagacactactagtcaaataataaaataaataatctttatcacattttaaattaaacaattgagacaagaactacagaaattggaaaaaaacatgctaagcagtgaatagttactgcacatggttgaaatttcaataagggagaggaggcaaaccataaaacagtttcacagaatacaggaaaaaagaaacacgagagagaaaaataatgggcctttccatttgctgatccctctgccctcagatatttgcatgcccccagatacttcctctcatccttcagttctttcctcaaatgttaccttctcaggttcgccttttttggctaccatataaaattggaattcaacttatagcattaacacttcttatccatttttctaatttatttttcttctgagaacttacaactatctaatatactatatatcttacattttaaaaatctttaatgcatctctctcagtaaaatataagctcgtggcagggccataattagtgacataagctgtatccatttgaggagtaggaacagaagctaaattggtgttttggtcagttttggctgctatagcaaaatgccatcaatggatcgcttaaacaacgaacatttgcttctcacagttctaaaggttaggagtttcagatcaaggagccagtagaggttcttggtgaaggccctctttctgactttcagagtattgtcttcttgctgtgtcctcatatggtggaacgagattaactagctttctgtcctctttttagaaggacactaatcctattcatgttggctccaccatcatgacctcattacccaccaaaggcttcccactgggattagggcttcaacatgtgaattttggtaggcacagacattcagtccataacaattggaataggttgtagaatgaatggatggatgaatgcaaagaaaggaaatggagattgtcactatagatgacaaactttttcctactttttggctgtgcagaggaggaaggagatgtaagactcagggagaaatgttatcagattggaacaatcaaaaataattaaatggtattaaggaggctccaagaaacaacagaagagatgaaagttaaaagcatttgactctacagaaggtggaaggagatggaatctagttacacttgtggggattcctgtttactgggaggagggtcagaaacagcatcatgataacagacagaaaaaaagacagtggcagttacaaataggtccacagagatggtggcagcactatttgggagtgccacttgaaaactttgttttgtcacagaagtagaaagaaaggttatctggtgaggaagaaggaatggaataggactggcttggaaattggaagagaaagaggaaagttttaatgagttattctggggaatgggagagtgggagtttgaccaaagaagttaagttccattgctgtgcagtgttgagagctcgatctgtgacagaggttagaccatgaggctagttttctgcataggttttcaccgtggacatggatattttcatctagacttaggatattctaagaaaggcatgatggaagaactgcaagggggctctttataaagagttatttgaagtgatgaaaaatagaatttgaacagtaaaaacttgaagtaaatagataagaaaaaataagagaagtcaataataataatagctataatttgttgctcacctactatgtgcaaacaacttttctaaatattttacatatatttactcaattcttgtgacactcctatgaagtaggtattattacttaaatttaaactaccattattactctaattttacagttaatatgaagacatctacctttatacaaaaaataaatggcaaatatggaatttgaatgtttctatagtctagttcttgtgccttcgctaaaggactttgctacacagagatcctgaggagcataaatatcactactaatgggggaattgaacaagtgaaatgggaggtttggagatgtgcattggaagagatgatgattgaattagaaaattcagaaagaacacactttaaggtaacaacaaggttctgttctaggcaacgtgaactttctttccccctgctaccctccagtggaacaattcaatgctgcaggtataaaatactttacctgcatttattgaagattatctttttcatgtatcatttttgagacaaaaaaaagttttgataagacattgagatcttagtaattttgttatggatttttaagaaaatggattaaagtattctcagtgaaagctccatgggagagcatcttgaggtaacagtctcaagaaatgggtcagactgggataaagaccaaatcacagagtagcaacatatgtttatttcaggttatgatagatcacataatttgtacttcacctttattatttcagataactagcatggagtttcagaaggtgatttttttttcaggatgaaagcttattcatgcgggtatatctttggctctagaaattactgtcatatactcagtaacctttttgaaaacttgctgattgatcatacaaatcagggtcatcatttgtgtttctcaagaaatactgaagccactccaataaataaacttcatggtaacttgttgtttttacttgatgtaatgtgactggctaaccattgtataatgtctctgtgcttccattttgcattctatagggctagaggaggtgtaccactgtggaacagtgtacaggcttccaggctcaccttgatataggaacaagcttggcctaaagaagtcagtgtggatgaagtttggtggagggagatgaattacaagactatacaggactcgtttccttgccatagaaaggaatatgaattttaatttaatgataagaagcaagtagagacgtaatgtctacccctttttataggtataaaatggagattcagaaaggttccataatttgaagatgggagtctcataagtggcaaggctggactttatactcctgtctgcctgttacaatgcctattcttttttcaataccacctttattatctggtacatagatacttaacaaatgtttctgaacatatatgtgctctgtgatacagcagatgaaactttaaataactgaagtgaatacatttaaaaatactttagatgcatttattaaaagataacaataacaacaagctttattttgatcatttaatttttcaataatgtgttaaatactttgtatggattatcttatttattcttaataacaatcctgtgaggtaggtactattattatgcccatattgtacgtacatggacaaatatcttcacctcaatactgtgaggtaggtactattagtatactcattttataataacaaatattgaatatttaacaaatattgcaaatctatacttaaaatgggtagaataatagtacctgcctcacaggattgaggtgaagatatttgcccatggtcatacactgagtaagtgataaattcataatagcagaaactatttcactatttgcttgattgtcacagggaattctttgaaaccatgtttatatttgtggttattctgtgtatgactagatggttataaaagtttaaaaattaatttcatagttcacatttttaattttctataacaattcagagagactatccagacatatgaattaggagaataattctgaagaaatagatgacacagcaaaggactctacatataggttaggaccatattcttgttgggaagatggccaaaaaagaattttgaggatattttttcaattatttaacaaatattgaaaatctattatgttccacttggaaaagaaagaattggtgggtaggagccaactaagatccaataaacttttgtctgtgacttaactcttctgaagttgtcagaacgttatgttccccagagttagttgttttggttgacagaaatctatgatatgccaaataaagactttctagttactattaactttgccttgcatgtagaaagaaaatattactcatcagaacttatcataaatcttaggatgcagtcatatccctacatatattttgattatttcaaaatcaaatatatactttaaaaaaggcttactatgttttgaagggttcatattttttttctgaaaaatggcaaaatagtgctggcctcatgatgcttggtttagtacaggaacatacatactaatataaacagtatgcccagccaattcattatcatcctggaactatattcagcctggctactatcatgaaagatgagtagaagcagtgagctggcaaagctggcctctgcctctggttgttaagctgttggcagctcaggatgcatgacctttcaaatatacgcttctaattcaggacttcttatgatgtcatgtagttatgttcttcccttttagtgtattctctcttcaaaattctgtgctgaaaaaaggaaaaaaaagaaatgtaagctactatccttttggccaaatgttgaacttttccttctgtaactttgtaggtaggagacagcagagtaactgatcttcctactgaaatgaatttccttgagcaaaattatttcaaaaaatatgtctggtatctttgtttatacctcagggttgccgagctgtcagctgcatgcctgcttttcattgaagcatatgtatatttgtgtatatatgtgtttgtatggcttccaatagcatagtaataatttcaggggaggaaatagaaaagaaagcaagataaatgtattacatttttgtatttcctccttgcatttttttaaagataagactctgttgtaaaatataaactggcaatttgatcattacttgttattcatttgaactagttcagtcaacagataatggacagtgaacagagagacctcttttggtaagccatgtagtttttccaggggtgattgttatgctatgtgtatttagatagaagcttttccctgtgtaatcagcttgctgctgcccattttactgccaaacattccttctctatggtagcataatactgttaccaagggaacagcttatggccgacacatacagtagtgccacaaattaatttcacagttatcaggatataaggtgataacagtaacgtgagctactgtgaaattaccattgttcccacagagttagtgtaattattacttttgtggtaactaagcaaataattcacatcactactcctggatgtttgttctctcttctctgtctcaccctccttctttgtctttccctttccttcctatattttcctcttttgttgattcagactctctccctgagtctcttttcacaattaccaattaatgtagagtattttttatattggcattaagaaagagttttattgaagtggggtgaaggcatctcatatatgtaactcatgggcataattaggatgttcacttctatcaaagatataaaggactaaaacagtgtattgagaggatacattcaatttgtgatcaatgtagactcagagattccagttttattttcatagaatgttaacttcatgtgttgaatagaaggatcagtttaatgtgattaaaagcagtggagaaaaattaacttccctaattagctgtgttgcttaggacaaggaaaacaacttagctttttagtacttacatctataaaattgggataataataatgcctacctaacagaattggtatgtggattaaaagagatatgtgtgaaagtgaattttaaactgtacaataaaagttttaagctattatgatcattgtcatataaatggggatacatctgtaaaatggggttaagtatattcacctaacagaattggtatgtggatgaaaagagatatgtgtacaaatgaattttcagctgtacaatacaagttttaagctattaccatcattgttatattttaatggaggcatcttttgatgatagcctaccctcattatcagaaaatttataaggataattcaaaataacagcagtaacacagggaagaacactttttattgcattttattataataaaaagagtgtttcattatacctagggcacaacaaaatgagatgttatcattataaaataacagtaattttaataatgaaattttccagagaatgagtcatattttttattgtttttattgagtatatgtatatgttaattaaaatttcagcattgaaatataaaataatataggagtgtgtatagtatgtccattattttttaaaaagctacaatggtgagtacatgtgaaatatgagttgttcactatgtcaaaaagtgaagttgctaagacaaaggtaaaattatagaaatgagtttatgtaggaatgtttgtttttaattgcgtcaatgtgcattatgatctttagtctccattctatgttattttgcttttaaaacgtattttatgtattctgttagcaagatcagcatatagctaacagttagtatcagttactaaatgttgagtagttaattatgtatttatttatcattctaacactataaattatacacttttagcagttagaaaattgatacatgatagaataaaataatttgatgaaatttgtagctaggcatatttgttgaatgaatgaattaaatatggtgaatatgtagtaaactgcctcccattgctaaatgtctttttagagagggtaggaaattaaaaataattattttctcatgtaaatttttctgccacccattttgaagttacccaacactggtaactttacataaagaagtatgactttaactggactctgtgctcatcccattagttaagactgctttctcacattattattattttggaaataagtaaaattatttttatttcctactcttatttgttctctacaaagaaaatctaatgtgatctacaaaaagatactagaacaaacaagattaggtatattgcaagattgatatacaaaaatcaaatatattctaatcactaacaacaaacaattaaaaattaaaacttaaagcaataccatttaagatagcataaaaattatacagtactagggataaatctgacttgtgaaagatgtgaaagatatgtgtactaaaaatctatgtaccctgccctgaaataagtgaagcatggcttcccactttttaagtgtgaaataagcgtggtgacttttttccgaaaagtataatatgtaaagagttggaaaagagtaactttacagaagagaagcctgaaaaatactaactagccaggcaatcaagattgatatcaatggtagtaagtcatgttgataatatgtacccttaggtgaatggaatccaggtcaaacaagctttttaaaatagagatttaaaaacaaaacggaagtaatatatgttaactgtaaacatctatgatcagtctttaacgtttttaatttgcttttctataatggtgaatgatgctgaatatcttttcatgtgttttatgccatctgtatgtcttatttggtaatgtgtctgtttaggacatttgtttattttttttggtcggcttgtttctgttattatttatttttgagagtttaaacaatattatggattcaagttcttatcagatatgtgccttgaaaatatttcctcctagtatgtgggttgtcttttcattctcttaagaatgtcttttggccttgcctggtggcttatgcctgtaatcccaaaatttgggaaggctgaggttgatggattgcttgagcccaggagtttgaggctagtctgggtaacatggtgaaactctatccttactaaatatacaaaaattagctgggcatagtggcgcatgcctgtagtcccagctacttgggaggctgaggaaggaagatcacctgagcccaggaagttgaggctgcagtgagccatgattgcaccacagcactctagcttgggcgactggagtgacaccctgtctcaaacaaacaaacaaacaaaccaaacaaacaaacaaacacaacaaccaggtgttttaaagaacagaaattgttatttttgatgaagttaaatttatcaatttcttgtgctatgatgtgtattttggtgtcatatctaaaaaaatctttgtctaccctagggttgcaaatattttctgccatgttttcctctagaagttgtgtagttttgtgttttacatttggctctaggttacatttcacgttaaattttatatatggtatgagttatggtcaaagttttttttcgttttgttttgtttttgtttttttcatatgggcatccaattgttttaacaccattgtggaaaagactcatttctccacggaattgactttgcacttttatgaaaaccagttgtcagtatatttgtgggtctctttctggactttgtattctgtggcattgatctttttttctatattaacactggtatcatattgtcttcacagttagtcttgaaatcagttagttatagttctcaaagttagttttcctttttataagttgtttggctattctaggtcacctgaaattccatatgaattttagaataagtttgtctatttttactaaaagcatctgctaggattttgattggggctgtgttgacttgatatatcaatttgaggtgaatcaccatcttaacaaaattgagtcttctgacccatgaacatagtataactttccattttgtaaggactttaaatttttttctcagcatggtagttttttaaaacatattttaaaacttaggaatagttttagggttacagaaaaatagcagagacagtacactatatagagatttcccacctacaccaagtcagtttcctttatctttaacatcttatataaatgtgctttgtcaaattaatgaaccagtattgatacattattattaactgaagtgcatactttattcgtatttcctcagtttttacataatgttctttttctgatttagaattccatccaggataccaaattatatttacgtgttatgtcttctgaggcttctcttggctgtggcagtttgtccaacttaccctgtttttgatgaccttgacagttttgaggagtattggtcaagtattttgtagaatgtgccttacttagaattcgtctgatgttttcctcatgattagagtgggattactggttttgggaggacaagaactaagatgaagtgtcattctcttattttcatgaaattttatgggcgttttgatgtgattgaggcttagtttcatcatctgtaaagtggagataatgataatggcatgcagtaaacactaagtgagaaaactatgtgtgtaaagtatttagcattaagaagatctgatgcagactaaagagctcagtagcggccaggcgcggtggctcacgcctgtaatcccagcagtttgggaggctgaggtggacagatcacctgaggtcaatagttcaagatcggcctgaccaacatggtgaaaccccgtctctactaaaaaatataaaaattagctgggtgtgttggctgcctggaagcagagagaattgcttgaacctggggggtggaggttgcagtgagccaagcttgcaccactgcactccagcctgggcagcagagcaagactctgtctcaaaaaaaaaaaataaaataaaaaaataaaagctcagtagcagtatttttctctttgggagatgggcaaggccatatgactagtttggcgtcaggagtatctatgattaaggtcttcttactgcactgtccttccttgtgtctaatgggcataccaaaaatagttgttaatggaaatatcttcactcggtactgcattatgactatgcataatagagttagcaggtgaaaggttctcttagaacaattaagaagtatgaatccattccatcagctaaagcatttaaaaatatagtttttttttgtaattggtttctcaaactcaaaatattatgagcactctgcttcgcagagcaataggatattgacaatatttgggtttttttcttttttacccattactaacttcctttctatatttctacttctttgtcttttcctacaatgtaacataaaaaagatccattacaatattggtgcagctaaatatttgagtgcacaaattttagtgatcagaatagctttagacaggtgtataaaatgcttgttttttctctgtcctcagtgtgggaaactgaataggataaattaggttagtcaatacactagcatttaattattctttttctcaaaagaaagaagtttttaaagtagtaaaaagaactgtatctgaggccagctgattcacaaccagaccatcacatttagttactagacttaagcatggcttctctggagacattctgtgttaccaaaaatgcaaattactccttcaaaaaatttacacatggtacaaatttagcacacctgtagtatgaatctacattagaccacaaaacttgttccaatactctaatgctacagttgcaaaagcacatcattatggtttccaaattaagcagaggtttcagtggttttaattttgtgaagatgttttccttcctgaatcatattgtgagtctagtagttcttaactgggggactgggtgttcctgtcttttggaggacatttggaaatgtatggacatttggaaatgattgtcacaatgatttttaggttctctgacatttgataggaaggggtcggaaatacaatacatcccacaatgttgtggaaagcatttaataaaagggaagcattaaatatttcttaaaaatgtgaatcatgccacttgagaactgtgggtaatcctgatgtcttatgagaaaaatctgtgtttatgtacattatgtattaaactgttatttagacataactttggatgaaccaactgccttttttcttactgaatatgtaaaaattaataaagaagctataagctcaacagaataacttatctattcataaaatgtctttcaatagtttaatagataactggaaatttatttttgatagcagcttatactaaagcaaataaggacgtgaaaattgtagataatctttaatcatgcttacaaatttgattaaaatcatctgttgattttttttcctaattgaatcttttgaactcaacagaatgtctttctagtaattctactttttccaatatgtgacctaacatgagcctagtcttttgaagaattctaaagatgagtgaaaaagagatgtgaagagagtaagaaataatatccaaatggtgagaacacagaaaataaccacactgtttttactttttcaacatatggtattatccacattttgcagaaaaatagaatgtattcaagcacgttttctgagacaaatgtcagaaaagtaagagaaccatataaatcacattgttgcagactattctgtgccctccatgaaaacattgtatttttgtttgaaatgtgtaaattctgtagaaaatcagttctctctagggtcgtctggtgtagaatccttctgggctttgtatcatccttttcaatatgtttaagaaataactattagagactaaaatattagtatcattcctctctttcttatgcaagaaaagtgacctcttttagcagcaacttttctgtgtaaaaagcacgtgatcttgaagtcagctgggtccatgaagagtattcgttttgaacctaggccaactttaagacagaattgatcatttttctccaataccagaaagagtttgctcttagaaaatggtaagcagtgtggggattccagatgatttcttgagggaggtagatgaaaagtttacaacgtaggtcccaggtttctgttaatgtggctcctcattagacttgttccttccccaaagctgccccacctcccacaaatacctcaagtgatgctttgcggtttttctctgttctttaacttgatatttctcccttgcaatcttgaagggcttcgttttttgtttttcaaaaccatcaatctctaagtctatcaaagacttaaagcagtatataaattaatcatattgtgttaaagctgcatgctaataactagctgagatcagctgtactcagaggttgagcattttgatttgaggaagggagctgagtgatttgtggacacggagtctttcaggaggtatatctaagaagacatatttattttattcttaattttgttattcaaatactgcttttgagaaaattatgaagtagcaaaggaacttaggccagcatgaggtcatatgggcttggaaggaagtgtgggaggtgagaaaaaaagcacagaaaaaacaaggctatttaaaattttccttatcatctacaataaataatatgacttattttctgagggtgaaagcctaaaattcattttcataaactatttcccagaatttaaactactagaattcaccatgcagggttttgtatcttactgatcaatagtaaacatgcaaataatagcttgtgattcaattttgcaaaagaaagaaatgctgttaaatgattgatgctcccagtatagtcagaagccatatcattaaactgtgtctcatataaagcatttctgagggagggtcagctcatgtgattagttatatttgcttctgaaatatgtaatatatggatagtgctttcaaattttaatactgggtaattagtagattaattttatactcaaattagggctgttatgtggacattagccagattctgggtcactatgaatttattattgaatgaaggtactaatgtgtaccccagtgcaggttatttcttgggttaaggttttattcagccacaggtgtttgcattaaacagcttgttcccagcactttgggaagcctaggtgggcggtagatcgcatgagctcaccagtttgagaccagcctgggtaacgtggtgaaaccccatctctacaaaaaatacaaaaattagccgggcatggtggtgcatgcctgtagtcctagctactcaggaggcttaggtaggacgatgacttgaacctgggaggcggaggttgcagtgagccgagatggtgcctgggccatagagccagagtttgcttggaaacaaacaacaacaacaacaacaacaataagaaaaataatacagcttgtatttttgcctttgcaatattattcaatcctggatgagaattcaggggaattgcctttctgtcctttattagctgattagccttgggaaaatcaggttggattctataggcctatgtactccttgatcacttttttctcacttcatgttagttatcaattgctacataatcaaccattccaaacctcaatggcctaatgcaataacaacttataattttttgcaattgtgtcaattggctggactcagtgggtagttcgttggtcttgcttgagctcattcaaactatttcagtgatgtgggagcgccgctgatgctggcaggaccaagatggtctctcatgtagttgacagttggtactgatcgtcagctaaggtatctggcatctttcttctctctcatatggcttctcctcctttggtaggctaaactaatatcttacagcctagaggtctggattctaaaggagcaaaagtggaagttaccaagcttctttaaaaccaggttcaaaactggtgcagcatcacttctgccatcattttataggtcattggaactcacaaagtagtccagattcaagggaagggaatgaaggtcccaagtctctgttaatgtgcctcctctgtagctttgtttcttccccaaagctgccccacgtcctgcacatacctcatggattgctgttgcagctctctatatatcttcatgggataaatatcacggacatacagggatgggagggtttattggcaccatctttgaagtaaagctgccacttattacaaataaagtagttttcacattgtgttgcaatggcaatttaacctgtctacctctctactaccgtgtgatttttctagaggaagctttattactaaatcttgtctcttatatgtatgcagcaggtgaccaataaaggtcaatggtagagtgatctttatgttgaagttgttgattatggtaatatcaatgtttatatatgcttatattttagcacttacatgtaaatatcttcacctcttttcagaaaagaggattttgagtttaacttagttttcaaaagtgctctattattgttatagccttgttcgacggaacttctgtttgttcagaatttcccttaagatttagctttttttttcttttttatgaacaaatggaggacatcataaaaattgcagaaggatcattattttaaatggtgtgccttagacttgcagtctttgccaagaattattctttaaagtgtttgctacttctctgcctaacggtaagttgaatcttgtaaatagacctctttcttcttcttcacgtattacagactagcaggggaactttgccatggatgactgccattattctaaatgcaggctagaaatgcaggttgacaatttaagccagcagttgtgatatagcatcttgaaacttctttatttccaaagtgttttcattatgatctatttcactgtttaggataaaagtctcacttatttcattttactttagatgttgatgcaattgtggcttattaagttatgctttcaaatattttcactgccaatatcaagtatcctactgggaaatctgtgaaacaagatgagaggctttattttctttctgaatttaggtattatttgtgtgcatatataacttgaaaattgtagtagtattttctgtaattgaccaaatgttcaatttttttcattactattgtatggaaaataggagaatgcatgaatattttaaggactgttcttagttcacagtgacctgtggttttttttcctcaaagccagagaaataaagcataaaatatgaagcaatggctaactagtctagaagttaggaacttccatgcaaaaggagaacaatttacacagttttctccctcactagttatgtaataattagctttttatttccacccaaattctttcaggtatatactatattttaacaagctttccctttgcaaatttttgctatttttaggtcaaacaaaataagtaataactccttgttgccaagataacataagttaactcattgccttcagaatgtgtaatttaatattggccttcagaaatcacactcttcagcctaaaaatagtgctgctctttaggtgtaaacttcaggtgtctattctgttttattcagagacaagctaataaaatgacttatacaaatgtctcctcaggtagggccctcatcttgtgtgtgagcacatttccaggatgagaaggataaatattgaatggatggtcctttggtataaaataagataatctttgatagatggtggttttagatgagaacattacaataattcagagtggactaagcacattttatctttgtgctttaaaaaaaatcatttgtaaggaagatgtcttttgcgtaaaagtgaaggccaattacacgtcacaaatgtccacatttttacatatcacacttgttttcatctgtacgttaaaagaatccatgaatttcatcagaaatataaattttctagggcaccaatcatcaagtttgttagaattggtaaagtgttggttaataataaacatgtaaaagagaaaggaatgcttttctaaaagttgcccttgttctttttagagtaatgtgatttaattgccattcatcttctgattgtcttaaattgcgtattttgggagagaagttgaatcccttttctttcttttttttttttttaatttggctgaggcatatcgttgacccaagatttaaaggccaaattgggaagatatcattgcagtcaagagtcagtggcccggccggacgtggtggctcaagcctgtaatcccagcactttgggaggccgaggcaggcggatcatgaggtcaggagatcgagaccgtcctggctaacacagtgaaaccccatctctactacaaaatacaaaaaattagctgggcgtggtggccagcacctgtagtcccagctactagggaggctgaggcaggagaatggcatgaacccgggaggtggagtttgcagtgagcggagaatgtgccactgcactccagcctgggtgacagagcgagactccgtctaaaaaaaaaaaaaaaaaaaaaaaaaaaaaagagtcagtggcccaaaagaaaaaaagataatctctcttgtggccagcataaagatctattaataaacacagggtgtgtgatgtgcttgaaactcactgcatatttaggttctattcatgtttggagaactgctataaaaacatacggcattgaagactgttgatggatgagtgtcattgcctgttgaaagcttcaaatcacaaatatgtgtgtaagtaattattttcttccatttgtgaaataccactttaaatatatattcaaattgaataatatgcataacataaaacagtgatccaaactgatttgtatgacagtatgaagaacacacagatagaagaaatctgtgtggtgcatgttgtatctcagggagatagatttttacctttctcatattcagtaaagtacttttatatgttatacattatgaaaataacaaatgaaatatgcataattattaaacgttcaatggactttgtggtgtttgaagcttatacaaaatgcaagtatattttgctatgctgctatgtttttctctttctacaaataaaagtttgtattagctatattctcatttaatgattttactaaacaacaggatgtgaataattttcattagacagcaaagattaataaatttatttgtgtttattaaaatcagaacaccatgaaattataaaaaattatattttacaaatagcttattgtctttcttgcttttaagcacattatatcctcacacaaaagtaaccagggcaggaattgttttcctagcatctgtttgtcattaaaattcttctggacataaaattttatgtattggctacctttgttagtgtctatttaactgtataaaaaatggaggccttaagaagttgatatagatgacagtccaaatcacagtctcatgacaatgtcacattggataactcaggttaatctggtaatatgcatccctcacatgtttttcacagtagttagaagagactgtctgaaaaggaaataggagagaggtaggtagatttgaacacagatcatttatgagagagagtgcttccatagtgcctgtgtggagtaataggaaatataaactggatttcttttcttggtaaagtaatcgcctattttgttaaatgagaaccacccagaacattttgtactacacttcttcagaaagatagtttagtcttataaaactacatatatttacatttgtttaaaacacttagagacttaagtgtgttctcttgttctttatgtcctcttcatctagagatctacttcatatatcccctagagcttcttgccagggaagcttggttactaagtagatacctacactctcaactgttggtataaagcgctgagaaattggttttatttacactgtaagagtaatttttttttttaaaaaaaggaaaagcatggcttatatctaaggaaacactgttgtttggagaggtaatgaatggcaattagcaggaatcgtcatgtctcccattttgctttttagtattcctcctatgttgaacgctgacagtctctttggaatagaaaatcaaatgaagtcaagtattgcatattagatggctgataatgtgattcatatctcttataacctattacttctattactaacagcaaaaagaaagtgagaggataatactgccagtgtagtttcctccctgcttattaagccaagatatgtgtactgcctgtactctgaacttgcctctgctgaggtagcatctattgtcatgggaaccattattttattggaagcatgagagatttcagggaaaagctgatgctttctgttaccatgatattgggttagacttgggatttagaataaattactgaccataagaaaggtgtagcctttctctgaatgagttgtcttccgaatctgcaactttttttgtcttttccagtttcatgacctctggtaaatgatgcctccttactttgattaaaaataaaataacaaggctgggtgtggtggctcacaccttgtaatctcagcactttgggaggccaagacaggtgggtcacctgaagtcagaagttcaagaccagcttggccaacatggtgaaaccccatctctaaaacacaataattagctgggtgtggtggtggatgcctgtaatcccagctactcagaaggctgaggtgagagaatcacttgaatccaggaggtggaggttgcagtgagccgagatcacaccactatactccatcatgagtgacagcaagactctgtctcaaaaaaataaataagtaaataaataaataaaaaataaaataaaataacaaagctgtattctttccttatttggaaacatctccctgggaaagcagtccctacttgccaaacccgataaagcacatctgattttctgtggtgtaagtcatcttgtataaaagtattactttaagtaggatgatcaatacctattcctgtacaactagggcatggagttctttttcattttggaggaggccagttatttatagtcatgatcattcgaataatagttttttcaaaaatccattttttatccttttctgttcaacagcgttggctctgtaagaaatagaaaggggacatttgagagatgagtaacacagggattataacagctagcatttggtgcttctctccaacacactcctaccccatgctttcagaattctccagtgcccaccacagtattgcacattcccctaggactgtgccttcactatgtcggctcacatggctcacattagggtgaaccatggtatcaccctgatgataccaccacctgatatccagagaatactttctcagtcctgactcctacagacaaaagtaacaaaggagtttgaccatttattctgtcaaaggtatcaaaggaaaataatttactctttataaatgatttaagacatttgattaatactattaaagatagaagggattgtcatataaagtagcactgaatttgtggtcaatttctgagttgtttttcattcactggtcttgcctttatactacttttactttctgtgcttttactgaacgttttaaatctaaacagggaaatgaataaaattagaatacagtttagtaaaatgggaagtaaagtgagtatacatggcagtgcccccagcaaatgtataattcttagtcctctacctgcagatagggaagagctcactgtgatggggtcccatgatccaggaaaggcaactgcaagggatgtggacttctgtagaacatgctcaaagcaaagctgcagtgactgctgtctgttgtgctgcaaagacagctgtctggggccacagaagaaaatgggatagtgggtttgaaagaaaggcaaatctgtagagaaatgaagataacagaggtggtttaggctggtagctctgcgccgtgatttatgtaatgtgaagtgaaccaggcagtatggacaaagcatcctccacagacctttgtttgcagtggtttaatcatgtatctattagtgtgagaggatgaggaagagagagaacagaaaaaggtgtctgagtttacttcctcaacaacttaaaatttatctttctgtccctacatggttaccttgtactaataccttccagtgttgcacttttcggtctaagagatttaccaaagaataaaggattggaatgagacacaggcctgacgctaaagtgaatcagtcagaaccaccatatcctgtttctgtgtgatcttaagcagctttctcaacctttgctaagactcagtcttctcctctgtggacatgcatggtgtggttattgagctaagctgtatctaaatttataagcatttgaaatattatttagtgctgattaaccacattaaaatgcattattggtatagaaaaaatgtgagttgacttgttaaaatcatttgtataatttttagggtttctttagaagataggtaaataatgtctatcatttaaagctgctaagaaattatttgtaccacagttttggaaggtgtgttcatggatactctcaggaactcagtgatctttatcacatcattaggatcacatatacatttaggatgtgattcaggttgatataaatcattttgtttcagaacttgcagggcattttttctaccctaaacaagactctagttgttaaagaagggtttaatgatgttgaaaggatgtctttatgtaactaaacatgcatggaacatgttatacagtaggtgctcaatggatgcatatatgtagacatacaagaatggatgagcaaatcaaaacattccctggggcatctcagaaatggtaatgcttacactctaaatatgagataactacatatgtctaattttatcaaacaaatggtggtcttaaaatcataggtaatttttgtaccaaaagtataaagcaaatttattagtttttacttttgtatacatttacaatgaatatttcctcaaaatgtttaaacatttatagtaatcacatacagtggatggaaatagaactctataatgaagatacaggtggaggtttagccaaccatagcagtgtagctaagactgctgtatcatgagtaatacagcttgttttcttggttttctgtggctgtgtgctccaagcagattgccccattaactgtcgtgagagttgcagttgtagtcattctggacattatgaagcttctagaataatgcctgttagttatttgttctgctgttatgttaaagatacgttcatattttcattgtctttaccttgctgtattctcttaaaaatatgatattgtctttatctgaaatagtatcaagcatctttagttttctttaaatgtcagtgaaattactctgcaaattgagcgaccaaatttttagtggtgaacacccagagatccatgcaatacagtttatagtaattcttcatttgcaatttgacaagttgcatgtttccatctggcttcttttcagttaaaagaagggacagaatgaggttttgtagagtactacttgcttggtagaacttagaatatacctccttctgagttgacagctgttgcagtatgttcaagaagtatccatgatttcttccctgtggcgtcaccaggtgctgtagtgcctggaggagttaaacgtggcactagcttttacagatgtcatcattgttatccacatgtaagaactctcttgattaaaactttgggcaaacagcaaatcagtaattaaactaagcattatgttattgtgcatgactttttaaaaaatttattgttcttttgtccatgaagtttaaacaagttttagtgaattttcagtgttcatgacatatggaaaagtttactgaattgtcaacttttttctcaaaacaacaatgtcgaagtcttaatcatagcctttatttgttcatcagtttctaatttttccccatttatgatttaactgcaactgagcattttactgaaatgtttttgttagtaattctgcttaattcgaaaagaacacaaaggtgattacaaaagtacagtacaataagttaatactctttttcctcaattccaagacatcactgatttaaaaattgcttttgtgggagaacacaactgcattaaatgtaattataaaacataacttgattttagaagcttcactgaaatcaaacaatgtagaaattaagttatgtaagtagccattatatattaggcacccaataaatattagatatctctaaaggtattttttgtcacaacttatgaatagacaatctataatttatcctagagatgaagtaactgatcatggccctacagctagtaaaagttagagttggttctagttgttcaacttctaaattcttatctttccatagaaacaagttgttacataaagtaaatggtactaccaggccaaagtgaaaataaggccaaaaaaaaagatgcaaccaggagtgataatactgtacaaaatgcacgccatgatttcttatatacttgataaagataaaaaataaattattctgtaagtactttagcaactaatgcaaaaagggaaacagagaacccattacaaacatgaatcactggatccatagagaagaataaatcagttcctgtataaaaacttcatgtttcatggtgcaatggaaatttctactgtggatactcaaaaagagggttatatgtagacaggtactttattttgtagtagtagtaattttgtagtactgttttattttgtcttcttgtaaatttcacacactagtgtatttatgtttacagtcttttttcaattttagtctttattttccctgtactttcttcaaatctaagctattgcagcttgtaagtctttgtgtgtgtgtgtatgtgtgtgtgtgtgtttgcaaaattatagagacaataagggcaaatacttgaatataacttcttaaactgttattggaaaaatagattctaaattttaggttacttgccagcatgtaatcagttatatgcctgattcttggatttaaaaatccttgtgaaaccatgtcaaaattattattttgttccaaatctaaaaatacccttttaaatgtagtgtttttctctcaggttgctttcaatagagctaataacttaaaaatctcaaataaattccagataatttctagacattatggctatattcctggtgaaggtttatttttataacagaatattctgaaaattaagatataaaaagaattgtcataaggtggcagtatgtttcaatgctaaccatcagtatagaaagagagcttgttgaaccaagtggttccttagctagtttgagctctgtatgaaaattccctgtagattttttttgaggaaaattgagcagctatttcttaggtaatatgtgtgaaattatcaaagatactactcttttgattttcagtattacttactgctgcataaaataaaaccttttccttcaccctagctatgcctatatatattgatacagcaatgaaaataaatgccttttgttatggtcattgatacatttaagtagtaagtgagtttacatgttttaagatataacattttaggttatagtcctgttgaatattgtgtaatagttataactttgactttggtagcattgaatgcagaagtattttggcaggatttaataaatagcattagtctatggagaagtaatagaatttaagctttttaatgaaatagagtaagtttaatttcttaccttctcactcattagctttgcaaacttgagctagttacttgggctctggattttttttcttgttaataatttagagataatataatgtttaccacacaagactgttgaagaatttaatgagatgatgtttatgggtatgctttctaaattttgagatgttttctaattattattataaccaaataatatattaactcttccttccctcccttcctccctccctccctccctctctctctctctctctctctctctctctctttctttctttctttcttttttttttttttttttgacagggtcttactctgttgcccagattggagttcagtggcggagccttgactcactgcaatctccgtctcatgggttcaagctgtcctggtgcctcagcttccctagtagctgggactacagacgtgtgctaccatgcctggctaatttttgtatttttagtagagatggggttgcaccatgttggccaggctggtctcaaactcctgacctcaggtgatctgcctgcctaggcctcccaaagtgcttgattacaggtgtgagccactacacctggctcctatttctattttctgatgtaatcttaagagaaaaacttgagggttgtcgcatttatttgccacatgacaggttagtacataatggctacttcaccacacagtcaagctagaacaaaaaaccaaaaagcatgtcttgttcatcatcaaccatatatcaacattaaagcatttttaaatttcctaccaatattatgtgcatggaggaggttactaggacccagaggacatgatatctgtccttaaatacctttctgtttggctgaaaaaataaaactagataagaaatgggaagacctgtgttctagggttagctggctttgaaatcttgaataggtgtcaaaagttctgtggttccagtctctcatttgtacattgaacttgatcatctgtaaggtcccttctggcacttttatccacagaatattttgtgttatgaatttgctaataagtaagcaacatacagtagattttcaaagggaagagaaattagtgtggccttgagtatttgcagtctctttggccttatttgcaagaaacagctttgtagttgctcataagtgaatggatagtcattttcatgactaaataatcttgtctctatggtaagtgaaaaaatatacatacataacatttaaaagcctggagtatattaattttttaaaagttttaatgttataaatgatctgggtgaaaaagcgaaacatttaaaatttttacaactaggtgttaggtagtaaataatgaatactcagagaagaaaagacatacagataaataattgttgcagttattagtagttccatcatggtaaatgatatccacacttcctatagtatttttagataatttcacttagagtatataacttttgtcgaaaagtttgaatactactttaattaaaactcacgtttgtagctttgcgcctttatgtattctcaaataccctagaaaatgtctaaacttgtaataacagtaacaactaattttgacaattaataaagtcctaaagaaaaatacactaagtatacatcaaaaagaatttccataagaaaactttaagcaggtttcctatttttgttgtgctccaaattgttgtgctccaaaacgtagactgcctaagaccaaggaaggaaaatgcttcaatactctgcctctgcctggagaatttacacttgtgttaatgaggaagctgagtatcagtttctctgtcttttttagattgtctgtgcaaaacagaggactttttcctgggtctccactacttcttcttctacatgcaggcagatgttgaaaagcatagaaaaactagagagaacgtcttgggaaaataatccaatcataagacctttttaagaggatcacctcaaaaaataaagacttgcaggttgtatgatacagatgaaccctggtagcagtgcctgcaactactacgcactatattctaacatcctggagcatactgaaaaatattaacctttgtgataacttcagagatatggacacaccttggcgtaattttaggacttcagcacagttcatgaaagcatgacttctttgaaaaaggagcaaaatatagactgagataaaacaaaggaaagaggtaagacagaattaagaatctaaaaacattaaataaactccactttgcaggcattcatgagtagaattatagctaaagaaaaatacaatcagtggtgaaaaaagaaatttgatcagctcttgataaagcagatgaaaatgataaagcttaaaattatgtgagacactctgttgtactatcaaatgctagatcttattcattctatgtttttgtaaccattaaccatccccacctttccccacctgctttccctcccaaccttatcaaacatcacatgtagcctatacatatatacacctaatatgcacccaccgtaagtaaaaatgaaaaaattaacagaaaatgaaacacatcatagaaaattatttttaaaattctaaatgtaaattaagatacagtaatgtgagacaaactcagtaatattcaggataaatgatgacccaatgtgggatttcttgaattcactaaaaaactatttgcattctagctatggtatcattcaattttctggaaatacagcaataaacaaagcaaacattgcacctgctctcacaaagatgacatcctgaggaggaagacagattataaacattaggacacaagaatatatataatatgttgggagatgataacatgttgagtaaaaacagagcagagttaagaatcgagagtagggaggcagaaataggtataccccaaagagaaagttaaataagtataaccaataatcagagatgtcatagaagagttttttctttacctgaatgtataactccaaatgatttattttcctagtttactattatctagtcaagttattatactacagcaattaagaaaagtcctgccaataaatatgtaggcaaaagggacagataggttaccaagagcagggggggaaatttaggtggcttcacctattcacttccatatatcagaagataatagaaaaattttgtctgcagaattttaaaagaaattatgttgtgggctaacagtttcacgtagaggcaagatagttaatgtatgttggtatataaatatattcttagacattcaggggttcagaaaatataccatttatctaacctattaggaaaaaaacctggaaaatattttacacttgaatggaaaacaatttagaaattgagagtacaagtgaatataaaagacaaatatttttaaaatagtagataataatatgagtctggcaatataatgatgataatctacatataaaccccagacactgtcacaaacctggcattcatagagcttctttcttttttttgtccctactccagtttggcatgcagtgaggtgacctttgaggatgctatttctagcaaatcattgatgatgatttggacattcaaaaggtttttcccttgtatgttttcaaagatgttctttaaaatgttcaaaatcgtcaaaccgtttcccacagtactgatatacatgaattttttttcctagttctttcccagttaccaactacttcagggtagttcaatttaggtgctgtttccgtgtgctctccagaagatactttttattgcgtatttcacacttgaaactctcagtagaatgtgatttcatgtgttccttaaaatggcaaagcaatttaaaggtggctgttgggcatggcctttgcatgctgtggacatgcccaggcacccgagatgggaggggaaagagtaagggtagatacccagagccatacttgcctgtggctttttaggtagaggctgagtcggtgtacctctacaggtggtctgatttgcacctttggcagctgagtgaaatgctcattttacctagtaacattgccacagcctctagcaaaactcttaatatcataaaggaagagataagagcctttcaaacagtgagagagagacaagagacgaagtctggggtgtttaaccagcctggttagggtggttaaaactccatgagggcaaacagatccttttactcacaggaaagagagagaggtggcagtgttttggaagagtggcagatcctacagttttgcattcatactctccttccaggatcctggatgagccccaggtaaaacaggaaacgttctcttatccccctcacagggcatgcaacggtggtgtggcttgcttcttcattgtcccaaagctcaaacccctagggggagcatgcatatgggcaggtagtggggaatgtggaccccacggcagcatctagggttgggtgtttacggctcccaaagctccagtgaacgtgtgttacagtgtgctttcagcttaggtgtccacaggcagcttgtgttaatcagcccaattagaccttctgccttatcacaaggacagaggggcttctttctgtatcctgggttcttgccttagtgtactgaaaaaatcagatcacatgtgggcttggaagatgggtgcaaagttttttattgagtggtggaagtaactgtcagcagatggatggggagctagaagggggatggagtaggaaggtggtcttcccctggagttgggcagctcagtggctgggctcttctccaaccaccctcagccaaattccatgtaatccgcttcgttctgccatctatggccgtgtcgttctgccatcgatggcaaacacagtgtctgtcagtgtgtttttctgctggtgtgttccactcaatgtccagctgcctgtgtctgtgtgcctcctcgtgtctcggggtttttataggcacaggatggggggagcatggtgggtcagagtggtcttggaaaatggaacattcggacgtgaaaataggagtgctgttctcacttaggtccgtgggccacaggcccgagggtagaaccctcaccggggacaatgcccttctctgccagcacttccctgcccttctcctgtatcattagtaaatatgaattaaacttatttactaatatcctaatatgtcttgtggaaataagctcagaggaaatatatattcatgattaagagtgttggaattaaatttcctggattcaaattttacttgaaccactttctggctcagttgtctcatttgtgcagtcatttgataaatagcattagcctcccaggattgatgtaagaatacataagttaccctattgaaaattagcggggtataggcattgtaagaactcagtgtttatttcagagccattgttagagatagaataaaactcacacttcttccatagggctctgaaaaagttagttcaaaacaaattttaaatttcttagctagctaattatttagattcctgattttctactctccaagtgaatctcctgcagaggccatgaaaaatcatagaggccatggaaaatcatctgtatagagctctatcagagaccatccatcctcttcagaaatctggcctctcagcttttcaactttattagaagaaatatttctattctttgtaagtttacttttaaggtatgccttcaatcaaactagtttacctccttcagcaccttgttccctcatgtatatgtttgtatgttgttgttgttatgctagattctccattctcctctacttaccagtttcctccatttgtaagcatgtatgagattcttctatactgaatatgctttggctcaattttcctgttctccctagttatcattctacttaaattctttctttcacaagtcagcctattttgaacaaatctgcacacacaaacaatgcatctgtttcctcatcaaatgcttacttccaacctgtgaaattacacttctgccttcaatgtgatctattgaaattatacttttatagatgactgtggagttctccaaattcaagtggcttctctacagttttctgtggagagaagataggatgagaggtggaatactgctgttgttaactgaacaggctggatagctaacttttcctttaataaaagaaagaaagaagtacaatttctgagttctttaaggtcaaacatggatttgactcatcccctgctgtatcctcatgaccttgtgcagtgcctaagactatggaggacactcaagaagtagttattgaatacagaggatgctgagtggcaaaattgagagtcttgtcttattttctccattttccttgtattccctgatgagaatgaggaagtcagagagtagtttaaagagataaaaaaatttaagacaacatcattgggcagaaaaagtgagaggactttgataaataaagatttatcttttatttttgtataatatgataaagaatacaagaaagaatattaataccttttacttatttttctacttactaaattttatagccttttccttttattaagaaatggaaataagttgagcataagaaaagaccatgtagcagataatattttataatatattttgtaagataaaacaaaaggtgctttaaattattagactatgtaatcaagcacacaagttattcattttgaaacagcaatggcttttttccttatccattaaatatgaatgttttcgtaattatttagaaaatctgtggggctaacgtactgtctatcatattgacagatgaagtcagaaacattcttaatccccaaatatgggttatataattagttttaaagaagattaatgcattcatctagctgttttgaatcagatgtaagggaatatggtatcatatacaattattattcagaatcataccatgatttaattttctttctttagaatgtgtgcttttaaataagatatactgctttacagtaaaaatatgcttttttgttaatttcatctccttcatttatttgaaataaatctgtatgcatgtctttttgtgcacatatatgcatgtctctataggatatattactagagatcaatttctggttaaaaaggcagaagtattttttactagaaatgtgaaatagctcattgaagttgatgcagccgctaacagcatattaaagtacttatttctcatttactttccaaaattaatatttttcttttttctttgtaattgagacaaagtctcgttctgtcacctagactggagtgcggctcactgcaacctccactaccccctggcgcatgccaccacaactggctaatttttttttgtatttttagtagaggcggggtttcaccatgttggccaggctgacctcgaactcctgagctcaggtgatccacccgcctcagctccacaaagtactgggattacaggcataagccactgcatccagcctatttttctttttaatgttagcaaatttcatgctagaaaacgtacattttgatttaatttccttaataactagattacacattttttcatatgttagataaacatttgaattttttcacaatgactagtttataatacttatgatattattgtctgttttagctacatatgcacaaacacatcctgtgtatatgtgtgcacatatcattttaagattataataagatatattaaggaactagtaaatgttaaaaaataaaatatttgaaagagacgtgtgcagcaaataaattgttacaatgaaattttttatttgcaagaggattatgaagtttcccaatttaatgaaataaaagtaattgttatattatctagtcagcctgtatggaatctatatcaaaaaacacttacgcaaacttagtatgttttctagctactcaaaacagtttgaaaacagtttgttctcatgtacagtgttagtcactacagttattaatatctttacattccaaacagtttttctcctttacatgcagagcattcactattcaaaatttttttttcccttttcttatttggaaaatcttggtactcatagaaaagaaaatatggaaagtttttttaaaaggctttgagttttgttattgaattaatttattgaaaaacattgggcatttctttgtttacattacctaaatcataacatcttatttgtttctaacagctaaaatcagtatgtgctgtcatatatcatacccctgtaaagtggccaaatttgtgttttaattaaataagacttttatgaattaattgttgcgatggtaaagtcatactgataataatctttacaccaaacaactaggacatgcgagcttcaaacttaggcaggttgcagtttagttgtggatgcacagcatgaacatattaatgagcactggccctttgcatttgcagttccttctgccaaaatgcccttcctctcagatctttcattgaatggctttttaatatcattcaggcttagtgtaaatactggcttcctatgcaaaagcctcactacctaatctaaaggatctcttcttctataaatcagtctccaagttttttgtttatttcacagcacaatcacaggtgaaatcatcttgattattcatttgttcactgatttgttcccatgtcctcaccaccttatattcccaccctaaatggtacttccgaagtggaaagataacttcttttaaatgtttcctataattttctattttatttctttggacagtgatttttaaaataatttatggagataatgtttgcaaatttttaagctgttttcacaggtagaataagcagctaatatgttcaagtttgatagtacatgtatttatattttaacagaaatatttctaaatcaacttcacatttcactttgaaatattttccaccaaatattttgagggctagttctgagatcttgtcctactctttgaaaatgtttagagtgaaacgaaactgtttttctaatctaaaaaacagagtgttttaaccaccacaaatcatcttataattatttaaaatgaaatcatataatggcaaatgttttccagcatgatatgttaaatggtgttacacaactcaaatacatgatagagattattctctggttgaaaaatgttaaaaatagtgttttttcaaggtaaagaagaagcctgttaccaccttgttgactattacttttccattgccttagaaaaaaatgtataattgtatccagttcttgtattctttgggaatgaaaatcattatgccaaagaatactttattccttccaaaatgtccttttctttcctgtggaatactgctacttaatggaaatctaggcaaacccagcaatttctaaatagtttgtaaagaatctgggatattctgtcaatagaaagatgaatagctatagaaagtcctcttataagttatatcttagtaaatgcctttctttttgtaatctcatatggaaaaccaaatgaaattttcacttttaaatttaatactcgagttttttatgtgtttttttctttattttgtggagattttttgattatatcgtggttaatattataaatataattttatttcccatttattttattgccaaaatatgacaaatatttattgtatcttaaaattgtgttttgtaaaatttgttttgctatatttaagagctctctcatttagccttttcatttaacctggtagactaatgtgggttttttcttatttggaaaagatgcattttgaaataatatttttgggtttagaagccctacatgcatgaaaatcagtttttagccacagcaaaaaatgtggagcatttatgcatcttgtagcagaaatttagcttttataattgaattattccaattttcacatcacaataactgttcacctatctaaattacaaagaaaatgactaagcttggaatgtgaaagaatacttaaagttcttacattatcatcacagatcttaatgtatcttctaaaatgacaataaaagagaagagtgaatttctttttctgtcaatcagtgatttgtgtgaaattcttgcctatataatgatgttgggcaatgcttgcaaaaaagtgtatttagaatcaattcacgttgaaataaactctggcaagggcacattcaggacacgagttcgtttttcctgggtcccatgtctatggcctcattataaggaaattttttaatttttttgtttaatacacacaaagatatacatacagacatacagcaactttcagaaacctgtatattatatggctccaagtatttaaaaaaatcaagaattatttgggctgcttgctcaagatatttcataattaggaagagatacatgtacatatttatgagaatactactcagattcccaaaactttcgaggacctgattgctgtctctctgggttatgtccttctttacttgagcattgtaaacttattcatggaaacatttaagtaaaaatcagatactcttctattgcagtagtggattttctattaactttgacaaatctcatcatttccttggtatgttggcaggaaaaacacagtcaagttgaaagaacctaaaatgattatctagttttggctctatttaaagagaggattgctgaaattaattctagatatttaaaacatttggatgttagttaatctgcagttgatatttgcaggggatcattgcatgtgttaactgctgcaaaaaaaaaaaaaaaaaaaagccagccccaaactcagtggcttcaaataataaacatgtattattacttgagtatacttatgcatcctgtcagggctgaattgtgtaggttgttctgcttatcttgactgaactctttcacacatttgggatttgctgcctgtagagtagtctggtagatttggctccatcacgtggactcttctccctgtcgtctctcatcctccgtcagacaaattaggagtcgctcacataggaatggcagggttccagagaggaaacagaacatgcagagtttcttgaggctgaggttcagaatgagcataccattatttctgccacattctcttggtcaaagcagtttgtctcagtttaaattcacagagtagggaaaaagcctaccctttgataagaagagctgcaaagtcccattgcaaaggttatgaatacagggaagggtaaaaaaatggactcattttgtctcaagtctatcaaagactaccatccctggtctcagttatacatgtctctcctaaaggaaaaaatatgcccaatccaaacccagaaattgaatccagttctaacatcatgttaattccagggtctcctatactacatgaagttctgatgtggcttctcagatgtaactccaaaaaggggaaaaacaggagctacctagcaatcaccgatcagtagtaattctgaaatcatgctagaaaaatgttaccaagtccctcatctacagaataggaaatgtttcttaaatcctgcctttgctccttgggagtaacttccctgtttattttttcacatggtacccttttgctctaccctctatgatgaccttcgtagtctatcactttcctgggccacttctgaagaaatgttctatttggcacctgattagttttcttagacttattctttcctatagaaagttgcagacaatttagttgatggctattttacctatgaaacttactgtaaaactttgtgtgttttctttaagtctggttatactctactctctgctgcaaaatccatactacaattattttcaagaatgcttctttgtacacacttaactactgctatttagggatttgacatttgtgggaccactctttaagatttctagaagcacccttcccctttcctttcccctgttgggcaccacttaattctttcagaggtgttaacaaagggttttacggccacagccttaatttgatcatagtctttaagcctcattttacatgatcttttgccaaatgggaagactataaggaaaaacaattttattttccaactcagcaatccttggcctctctatattccctctaaaatctgcttgcaaatgggtgagtgctgttttgattctctccttatcaatataccttatcacatgcaataaaaccaactgacattctgaatataatatctaaaaacttatcttaccatacttcataaatccattaggtatattatcttactttaaatttaccacaggcaacagttatttatttattttttttgagactgagtttctctcttgttgcctaggctggagtgcaatggcgcaatctcggctcaccataacctccatctcctgggttcaagcaattctcctgcctcagtctcctgagtagctgggattacaggcatgtgtcaccacgcatggctaattttttgtgtttttttagtagagtttctccatgttggtcaggctggtcttgaactcctgacctcaggtgatctgcctgccctggcctcctgaagtgctgcgattataggcgtgagccaccgcacctggccacaacagttttacatttgctgctgcataacacaggtcaccattcttccagcacacatgatcatttcattattcagcctttgataatagttcacttatcgtctttttagcttttgcatcaattatcagcctttgcttactacctgatcctagagccagtgccacatattttaggtttgtgttacatattattgtacttgtagacacagtctttcatcaactagctgttgttgtagatcaaaccactcccaacccagtggcctagaacaacgtgcatgtattactgctcacaagtctaagggtgaggtggacagtcctgcaggtctacactgggctcaactgatctcagccaattttctgatgacttgccagtgcctcctaaggagtaaggctgtcaaactattctgttcatttcctaaacccacctgggaggtgtgagctgttaagtaaaaatggaatatggaattcctggggtagattctctgtgttgactgtcctagctgctgtcttacatagctggttctgtgtcctgtgagcttatacctgaatagctccagtgatctgcctcagagtaatggctgatgggcacagtgctctagtagcctctctatatagccttagaccaaagaaatatattaaacacaaatttctgaaaatactttgttgataaatggattagatatccaagcaatgaaacataaaatagaaaagcatttccttccccaaaactctataaacaactcccacaatgagtttatgacaatgcttgaaactaaaagtaaaactcaagagtgaaggcgttgtatagaattaaaatctgtgactgaaaaaggtcaaggcatttatatttttaagctttagaaagagttggtcctcttaatgtttaggaaatgggcaataccattatgaaataaatatttaaagaagattggcctggtagtaataggtagattcaaatggaagaaatacatacaaatatgtcaaacatatgagaatattagttcacgtagaacttaatcaaagtatacttaaactataacatctcattgatttattccttaattcattcaacaaatattcattgaatgtataaattgttgggcactgttcacaggatgagagatataatataaattaaaattaacatcgctttcaaataattttcagtctacagggagaagtacgtaataaatctctaaaacaaatatggtacgtaaaatatggtgaagctatttataaatcagcatttcagatcataataaagtattgttaaagtttattcttaggaaaaagatattttccctagagtttaaaaattctttaaagtgtaagttaattataaatagaactagtttacttcttttcacataaaatatgggaactgaaaattggacaattaactttgtgtaaagtgataaagttaaaagtttatttttttgcttagaactgaaagacaaatgctaaaaagtattcattattattaacttgaacatgtagtgcagatgtaatgtcacctttgtactaaaccagaatagatagttaaaatctaaatacagatctccttttaagtgttttggaattatacaagaatttctgagtagggaatgggaaaatattaaaaatctctgtgttgggaagacagtcattttaccttatactatattttaatttcctagtgctagaattttatggatctaactatgcatttataatttgtttccttctttattctccaattttctcttttcttgtttttctctctttactttatgtaatcttccctccttttttcactttttgttttatatttaccccttcatcggttttatttcctattcagtttgctttgacccttgtttcctctttatcaactttgtctttcctcccgtctcatgccatccttctcaccacaaaaggttctgtcagcagtgttattattttttgaatacagtgatgacatcctacttttatgttcattctgaattaataaaatatgtagtaactgttagtgcaaacaattgtgacctgactggaagaaaacgaaaatccttgaggatgttttcacacacaataaatgcatactaattaagctagtatgaagctttacattcagagaaaaataagattcataataaatgtttggatgaatattgagaattttgatgccttttttattttaaaatattcttttcaaataccctaacataaatcaaaaataatcaaattaataaatcacaataatttaaaagatgcattacctttttatatggtgcattttacccctatgcaagaactattttaatcaataggcaagattattcaggtgagttcaacaaatttgaattcctactgtgtatgacaaactagactaggaaacaagagtatgttgttggatataatagttaaaatcctttcattttcctttcttgatggaggagttcagagaagggataggtcagccttgatggacacaatgaaggtagattgggtgtgcttttgccagaagaagaaaactaaagggaatgagagaaacagaaaaaagaggaagagaaggtaacaataatttaagaagtttgtattgtgcaattaaaaaaaaacattggttgcatgtataggcactgagtggaagataaattagactttatctacaataatttgttaatctaacatttattaatcccctcctattaactgggcactgtgctagaaatataatgatacagaaaggaatacaatatgggccctgctctgaaatgattttacaatttagtagggggagatagatgtgtccataaattagtttaatcaaatatataaacagaaaagtaaggcacaatggaggtgttggtcttttctttctcagtcaagaatattaggaaatacctttcatgctgggtgttaatgaggatagcaaaatatttattggacatttactactttacaaacactttgctagactctgtagagacttaatctcctttgttcctcataataactctaggaagaaggagctttttatgccacttaatacagattaagaaagtgaggctcacagcagttgtgacgacgcatatttaatatgtagaataatcaggatttgaatctaagtccattttacttttaagagactgctatttctactaccctatttcgggagtgtgagcttgatttgacagttctttgaaaatgttatggctgctatgcttaaaacaaattggaggtgtacatctttttgggaaaaaaagacaattatattctagtcaagaaatactgaagttctctgctaagtagattggaaagaaaggatgaagacaggaataaatgtggagagagaatctaaggttaagaaggagaggatttagagaatgactaatcaagttttaacaaaatctaagcagttttaaaatataaaggttgacttaatggagttacagagaaaagcagggggaaataattggtctctttccattccttctatcagctatttgttcatgactttatcattccttggcaggactatgacaataacctgctactcattccttatactgacaccagaattgagtttctacagcatcctctgaataataaccttaatggctctcctttatctgtacaataatatctaaaattcttatcctcggatataaaggtgttaatcttgtcactctgtggtacattttatatgagttctccagtaacatattccaattcactaaatttttctctgactatgtcctctctggaatgtacctcatcttttactttttcatttcaatcacagatttttctttttttaacttttattttagattcaagagtccatgtgcaggtttgttgtttaggtaaattgtgtgaaactggggtttggtgtacagattattttgtcacccaagtagtaaggatagtacatgataggtagttttttgatcctcaccctcctcccactgtccaccctcaagtgggccctagtgtccttgtgttccttccttgtgctcatatatactcagtgttgaactcacacttataagtgatagcatgtagtatttgattttcttttcctgtgtgtgtttgcctaggataatggccttcagctccatccatatttctgcaaaagacatgctttcattctttttcatggctgcatagtattccatggtgtgtatatataacactgtttaaaaaatccagtgtagtgttggtggttaggctgattaaacgtctctgctattgtgaatagtgctgcagtgaacatatgcatagttgtgtctttatggtagaatgatttatgtacctagtaataagattgcttgattgaacagtagtttggttttcagttacggaattgccacactgctttccacaatgattggaacaatttacactcccagcaacagtgtgtaagaattcccttttctcagcaaccttgccagcatctgttactttttggctttttagtaatagctgtaatgtcaggattttctatctttagaatttctgcttggcttattttagtaccctccatttctctttaatttctgctcattttgtttcatatattctcgttttgtcattaagggatagtagtacctcctttcttttcttttcttatgagaattttaaacagtaattttaaagacgttttcagattgctcctttttcactttgtaataaatttgtttcttgtaattggcagtcttctttggtattagtttttccttgtatcattttagaaattttgtgaatttgtgcatctacggtgattgttgtgtttatttgtttttatcttgatgaactaacaactctgtgattgcctcaacatggactttaagccacctgatgtagaaccatgtcttaaactggtggctctgggagtagtcccattgataattgtgttgatgttttatctatggaaaccacacgaggggtggctggacctacaccttagattcaagctacatctgtgttggattcctcctttctctttggcatacggttttatattatcctaattagcacgactttcagtgttgttctaaccccttgcatgggaagatcagtcctatccacctggcccacgatttgaagcaaggagcttaactacagtcccccacctgaggcaggggacgtttggtctcaattacactagcagagttgattctaggctatctctgcttgcttcagaacctggagcacttcagacctgtagtttcagttatgcttgctaccctgtgtctttgtttcttctctgatccctgaagtatctcagttgttctttaggtgccctctgtactttgacattatagtcgtccaccaaggttctatgatccccagtgatactgaaatcagctgatgttcaagtccctgatataaaatggtttaatagttgggtgtaacttacacacatccttccacatcctcctgtatactttaaatcatctctagattactcatatacctaaaaaatgtaaatacaaatataaatagctatactgtatcttaaaattcatgttatttttattgttgtattgctattttttattttttgaaatttatttttgaatattttgctttacagtttgttggatctgcagatgtgaaacccactgatacgggaggatcaactgtatatatgtggggtgtgtttgtgtatgtgtgagagagagattcaaatatggctgtatatttggaatgaagatgggcttccaataaaagttttacaacaaaattcttagaggactagtaaaactgagttccaatacagactagaatttcattccagctaccctctctcaggtatctgttatcctaactcttccgaggaacagagattttccctgagtgctttacgtacttctatattctatgcctctgcccattctgcttcttccaccaaaacacctccttccgttctctgttgaagacatcgttctttaagattcatcccaaaagccactttctatgggacatttatcttgtttcttcccattcctttctgcgtgtttttagagtcttttgcgcatgcttttagtttatcacgtcccatatatccataaatggatatttaagtatttgctgtccaataatatggttattgtgtaagttatggatcacattctgatcatctttgaaactctggtgcatagtatagtgtttgtcccattgtaagtatctaggaaatgttcaataaataaatatgtaattattaagtgaattaaatcagaatcatgcctttagtaacagtatatcaatttaggacaacaaaaaatacataaaagattgtagaaggtggcaatacaatgtaatatttatttgttttacaaatattcatctaaaacaaagcacagctgaaaaaataccagtactgaatggtttctacacaataataaacaaaaatttgcttgtcttctaagagaaatatttcaatgttactttggataagtgctgttttccactgttatgtgtaacttgatggctagcaggaaaaagaaatatcaaagatggttgtgaggtcagaagcagccatatggataaatttgttggattgcctaagagtcggtgagcataatattaaaagctaaatgggcagtaaagactcaaaagccaaggttttagcaattttaagaagcattaaccagaaacatgaagggaagtaggacaagaggaataagaaatctgacctaatgattagtcaacaaatgccttgggctcttagaactttaagatatttagtgaaatatttctgaacaccaatgcagcaaagctttgttttggtaggatgcagtaacgctggtatacagactgggcagcaagtaagcaaaacacaagccaaaaaatttagtcccacagaagtacactgcaggtaagttgttggtggaatgggcatgaacaccagcaaaccatgtataagtgaataaataactgtgtcttgaatagctgcttgccccaacactttgtgtactttattggattctcatgattctaaggtaaatattgtctcatttcccaaatggagaatgttagaaagattaagtggcttagccaagccctgcagcctccaagtagcagggacaggatataaactcttattttctggctccagaccagatcttttggttattctgtcttatactttctagaaagaagcttgatgtttcctgtgcaggaggctaaaatgacatgatagggatagaaataaatgggaaattgctgactgtagtgaaggtcagtgcctgattctcaaaattgaacttaaataactctcttaaggacttattccaaaattttactagtcggactgccaagaactacagggtggagaagctggaaacattctatatcctaatcacttaatgtagccaaatattttggaccagattagagttgtcaaatattttatcatttttactgctgtggattggatttcattcaagttattcacattctttttaaaataagggtttcactgctaatgaaattttaggagaggcctcaactatgttcttattgaaagattaatgtctctcatgtaaagaaacattcagagtttaaaattttggtgattatcaatttcccctaaaatgaaactgttttttttttttttgctctcataatctgataacacttttgacatatgtgaagaggatatggggtaatggcccttgtgtgttggaaggcactttaaagaccacctaatcatacacccattgctcatagctaaaaatgaggtttcacttagcagaggttaagtagtttgttaaaggttatataatttgttgataacagaatggcagccagattgcattatttgtccagtgttttttcaatgcagagggacaattatgggttagattttcttatttgtcttccctcaagagtttatttataggtatctttgattgccctatgactgaagtattttgtgatgggagatgtctatgaatgagataatcaaaaaggggcaggcgctccatttctcaggcagtgcgtattatgagaattcagtagtgcagacaaaagaaatggttagcgccaagctgccttattgggtattcatttggtaacactatgtagaaaataatgatcatttttttcctaaagagattgtaccatctacatccccttggatccacagtggaacttcctacatattgtgaatacttgtcttggaagctgatgtatgtaagatgtgtgtttttctagttacttgcatcataaatactttatattctgtatttaatactgaattatagctgtctacattatttttaagtatatgaaaaggggaaagtcttaacaaggcaaaaatattcctatttatagtaatgggaggtaaattaccttctaacaatttcagttttttcaagataggaacgcatatcctcaaaagccaaacaatggcatcgttatctttgttagtattattatttatttattcaaaaagcatttgttgaacacctggtgtggctgctgctgaaaatgcaagactaacctggcattttccttgccctcatcagcctccctggactcacctcctgcttcagtcaccagggccttctttcagagcctccaaatgctgggcctcctgcatctgatggtatttgcacatctcttctgcctcttccactgtctcctcaccctggctaactcctgcttctttttgacttagcaggaagacgttcctgatcccctgatctcactgtgctgtgctatcatgatttaagcttagtctacaatgcaatgtttgtttgttcacttgtttaattctgagttacagaaagaatctgtctctgtattacttgccatcattttcccttgaccctggacctaacaggtactcaaacaatattcgttgaatgaatgaatgtcctcttgagacctatcaggatatttggggatacagttagcttacaaattaattatattatagtttgaaaaatatggggatatgaataagaaaaaaataacatttaggaggagtggggggtagttgaggaaagcttctcaacggagatgacacctaatgctgtgtcttgaaggatgcccaggaacctgccagatagggagtgggaatgagcagcacgcatttctattgagggaaaagcaaaagtaaaggcaggaaaattgaaagaatatagcatatttaactgaaaatactgcttttgtattagcattactaaagtcaatactgtactgtcatcttatatatagaactttaacaacacctcttcaatatgaaaggatttatgcacccatgatgctgggagaacagattaatatcttcctagcttgcaaagcaatttcctctctgtggggttgttctgaaaagttcaccttaaaaaaataccaagtagggagcaggtgagaaatttcacagcttaatgaaaaggtggcacataagaaaaatttctgtaatattattttaaaataagtttctcttcttctttctgtttaattaaagcagaaattttagtgttgtctcatcatatggaaggcattcatgttttggaaaaatatccattttagatgtgaggaataaacgaggcaaaaatcaaacttccatcagagatcttcccttgacaaagggagactcattggcctccctgcctgctcccaccaccctgcgctataagataatgattgccaagtcattgtgtaatgtaactcatcgtgcaaatggggtatctatggagatcagtttatgtttggctttgtggtatggctgctgctttcattataatcctaatagatgcacgtaatatttacaattttattatgatctctttggttacacagtttatttttattcaacatactacttcccttctgtgttcccccttggttggcttgggagattgagacatttttcatcatgttttctagttaacatttattgagcagctactataaatatgatgttggtgcttgtcataattacctcatttattttcacagtaactgatgtggtagtccctgttttacagttttcaccatagctctatacttccaagtggctattaaaaaacagtgctcatttcccacattgtattctgcattgttcctagattataatacaaatgatttacattattgagcactcattaatggcaggaactgttccaaatgttccacatatattatttatttaatcctccctataatggtatgatgtctagactataattagcaatttagatgaggaaactgggacacaaaggatttaaataactttctcaagatcacaaagctaataatagagctggatttaaatccagaatccattaaaccatactgccttttatgatattgtgttgtggtgggtatcaaatgtatggagtgtggataaaagaagagagatcagttgaaagaagggatgatttgtttacagtgggggtgaattaaatgtggttgggcagagagctctgtgaagcagactcattgtgcacagttaccagcttgtctgggtctggtgagacaaaacatgcttacatgcaacaagttgcatgaagcaggtttattacttacagatagatagtagggaaaacaggagcctaagacccattgtgggccagtcttccaaggtttaggagagttgcccaggcatggatggtatcactaatgggggcatcccactggcatcacagctgggggattcagggaagcagcctgccctggattttataccccagggtcataggacatattgggctaaagtgttgaaggaatctctgtttctaggggagactagagcagagcttgatctgttctaccttgtcccttcttagctcaagatgctgcatttacagcacatgctatagttgttcttgagacctacaagcaggaaagaggggagaaccgggttggtgcaaggccatccatagaattgtcctgcaacctctatgctactttcagtaggatagtaacaagtgctttcaattcctcacattctgtgtcttcttaaagccatgtgttacttggcctgtccacaagactctctctccctcttattcgtcccgaagaaacaaataaatacctcattcatttaatcaacaaatgaacattgaaccgtcattgtgtccttagcatgatgctaggctttgaagatagaggaatgaacaaatgaatgtacctctgaactagggttttaattgaagaaaaagataaacaccctgtatctcttatctttctattaccccacctgtacataatctgaggatgggcatttatttatctgactccaccactgtgaagattcttgagggctgaacctataacttattcatcctgctatctccagcacttagcaaaatctcagaaaatagttaagtgctctatagacatttgttgattgaaggaaagaagaaaacaaagaatgaaggaacaacgcaaataacatgttaagattccgcagaacacaaacacatttaagtactattaccttgactcaaatttttcattcagctttcttaaattaatggagcatgccacgtactgtgacagcattgtcagtgctcttatgcatttcattaggagcatagtggagggaattttccatttttacaaaactatatattatttgcccttagcttttttattttcctgtttttctagtttaaatcatattaagctgtagacagctaattttattgatgttatttaagatattatttctgaatattgtgtcctttagcttctaggctaattttctcaaaaaatcttctcttaatgaataggtcatcttcatattagttcactttctaagcagtgccattgcccgaaaacgtggtctaccttatgatatgaattaaactgagaagattaaacatttatattcttatctgtttttcacccatattcattaatttcctgaaatttccacatattctttatgtgcaacatcagcattgattcttaggcattaaatgcctaagaacaaaagtcatgtcttaagccatttcatacaaaagcttgcatgaggttatagtggtcccacacaatagttttaatggggacaattttgttctgagctacttttatgtcattttatataatattccagatactggatagggacataattagtttagagtcaaagttatataagttagatatgtatttttattttatccattatatatttttattgtatctattatgcctcatatttctgatagttataaatgttgtttctaattgcttttattttgtctagtatttctactggaaagattggtcttactgatttctataggtaatttacatacgagaaaatgctttgtaaataattacatgatctgcaagtattattgctgagttcctagtaaataaatgaggaatttttgtttgcttgtttctaaattcagtcatatataaaatatatagtaatgactatgttatgcttggttttaatgtgttatttcaggaaactttctcaagttctctgggattactggctatcattatgagaactattgcagaaatgaaatgatgatccccacaggctggtctgtagagcaagtcaaacctggataagagtcctgaatctgcctttcacaaactgtgagacaagccttgatgtcaccatactctgttctgaggaaatggcagagataaccagaattatagatttttaggagatctttattaacttcttgatgattatcaggatcatacaaataggcagtaacatatttcaaacctaaatcagaggagcaaattttgtgccttaatatctttttctttagaatgagaataacaacagtatctatctcattgggtttttataaacataggagttaatatttatatctacctcattgagtgattatgaaaattaaatgagttaacatttataaaacacacagaacagtgctagcatatagtaaccccttgcataaatacctactaaataaattaaatataatgtttaaattataaagatttgttatttacataaatttgaagaacatttattaaaaaataatttttaccaaacattaactgtacaaaaactggattattgccaaaattctggctttttcatctgaattcaaattaatctatttccaagtagactaacctcaaagacagaggaacccaaccattttctcactggaggaggaaatagaagatagactagaaaagtgaatcagctgttactgtccaatgtgataattgctttgataagggaacccacggggtgctattagagagatcagaatggctccaagcatgatagccagggggtttcacaggagacatctgagctgagttcggatgaagacttgaagtgtggctcttcaggaaagggaagagcatgtggaatgcacagtttgaaaatgacctacacatggaactatgagcagagttctagcatcaggcaggtgttgcagctgtagctgtggaaatgcaatagaagccgaggctcagagataatattgtaccaagattctccccttaaggagaatgtcgtgatcagacagggattttaaaaagatcaccaggattgcattaaaactttagaaaaaaattcgtgctgaataaattatcctttcacttggcgtaatcaacatagatttagctaagtaaaatgaatgaatatttaaatttaaattgaatttaaatttaatgtatgtgtgtatgtgtgtgtgtgtgtgtgtgtgtgtgtgtgtgtgaagtaggtttactttttatttttgtaaaagggagaatgacaccatttttatggaataaaactaccaaataaacttgtatggatgtcacacatgaaactcaacagttctaagaggaagacaattcatatatggacattgctttccaaatgtgctatttcatcctctataataatggcaatcactgttgcacttttaaagaaaaaaactacacacacaaaaaaatctttttttaggccaggcacagtggctcacagctgtaatcccagcactttgggaggctgaggtgggcggactgcctgaggtgaggagttcgacaccagcccggccaacgtggtgaaagtctctaataaaaatacaaaaattagctggatgtggtggcacaggcctgtgatctcagctactcgggaggctgaggcatgagaatcgcttgaatccaggaggcagaggtcacagtgagctgagatggcaccactgcactccagtcagggcgacagaaactccatctcaaaaaaaaaaaatcgtttttagagacagcgttctgtcactgaggctggaatgcagtggtatgatcatagctcactgcagccttgaccttctgggctcaagcaatcttcctacctcagcctacagctgtgactaaagtagagaccatcatacatggctaatttctttcatttttgttgttttttggtagagacaaggtctttctatgttgcccaggctgatatggaacccaggcctgaagtaattctcccaaagcattgaggttacaggcgtgagccactgtcccctgccatatatatatatatatatatatatatatatatatacacacacacacacacacacacacacacacacgtatacatatatatatacacgtatatatgtatatatacacacatatatgtatatatatgtgtgtgtttatatatatgtatatatgtatagatatatgtgtgtgtatatatgtatatatgtgtatatatatgtgtgtgtatatatatatattttgaaagccctctccatgaagtatgtgtccagtatattaagtcatcctcttctaagtaggttccagtaactcctcccttttgccagcacagaacttagaacacagaaccttttaataattttgagttgaattatttctgttgttcaattatacctacacagctaatatgtggagacatttatttacttcaagattctattattgatgaatactgtcttttaattttaaggccaaactttttttcactattgtttcagcttaatgaatgagtgcctccagcacttgcattgtcactcagtattcttttcatccacctcagcccttttttatggtagctttatgagccaccaaatactcagaaatatggtcatcctttggtatatgctagagagttgccaggacccttgcatataccaaaatttgcacatactcaagtccctcagttggccctccatatagacaaattttgtatcctacaaatactacactttcaatccttgtttggttgaaaacaaaagcccatgtatacttgagcccagcagttcaaacctgtgtaaattgaatatccattatggtcactctatgaaaactcttaagtgaattctttgtaaggctttggagggattttgagaaaggaatttcatatatgggagtatcattggtttgcttttgcctggtcaattcatatgaccagtgcaaaaagtaaaaattacttaggataatgtgattttagtcaacatctatgtcttgtttttaataacgtaagttatacttacttattgcaaaaaacgcaaacaatatagcattgtgaaaagtaaaatctatcccaaatcttagtccacatgccctaagatgggtttacatatttgtctacatactgtttttttcataacaaacatattccgtacatctaggaattgtataggaacaaataacctattttatttatggatttaacaatttgagttcctttttcacctcttttttaaaaatttttatttttatcttaagttctagggtacatgcactctaaatctatatgtcagattactattactaatatattatttctgaaattgcccacaaatatgtcataaaatatagagctttctctgttttgaagtttgctgagaggtttacttctagggcatctatgaaaaatatatattagttttttaaagttttctaaaggagcttcattgaaattaagataaacatacaacaggtgtttcaaaaattaagaagataatttgcatagcatgtgaatatgcaacacaaaataattcctttttttttctatgaagcctggaataattatttgatataaatcaaagagtttatgatgctagtggggaaatggtccaggtgaaataagattacagtgcaatagaaaagctataataaaaactgttagtactgtcatcaaggtctgtgaaggatcaaaagtgtattgagcatcatgtaacagctgtctagaatatgaaggaaaccatagttgtggtgagcagggaacaatatcttggtttgcaaaaaaaaattacatatggcttgttattgttaaattaaaaatggtaactataaaatgattggactgtaaaaaatactctgaaccttgggcttcagaatatggctacgtgttaactaaatgcataactattctctattatggatatatgtggttgcatttatgtaaacttatttaaattaatgtggtatataagatataggtatttctctgttaaagctgttaactgaactctttaaaattctctattaaaactcttaactgaattctttgtaaagctttggaaggattttgagaaaggaaattcatatatgggagtatcgttggtttgcttttgcctagtcaattcatatgaccagtgcaaaatgtaaaaatggttggactgaacacttaaagcatatgtatatgtttgtcagatatctactatccttattgtgcataaataattgtaaaacattactctttgactcttcactaattccttccacattaaagaagagaaagcaatgtataactttcagaacttacagaaagatagaccatatttgtacatggatagcctattttgtcacggaaatttgctgccttaccctggaacatgagaaatattttgttgccatctcattagataacaattgagaaagggaagggagataggctgtacagaatagctagagataatgtgtggagcaggaataaaggaaagcgtcttttgtcacatatattctcatacttaccagttgcatccttcagatacttttcaaacatatgcaaccataataaggatcaattacatttttagctagaatgtagccattttcaaaagtagaagcttcacagtacattgtgttgtccaacctgtcatttttaatttaattattttagaagaatattttttacatcataccattaccatggggaaacaaccaaaagcctcaagaagaaaggattccatatacagtacactgtaaataatattggaccactgatgagattgacatgtatttttgttgtttgatttcctgaagtacagtgactgagaaatgtttcttaaacgcgtatgagcacttatatatgtgcccgctaataggatacgcactgagaaccaaagatgaattatagtcttttgttttatttattaatttgagatggagtattgctctgtcgcccaggctggagtgcagtggcataatctcagctcattgcaacctccgcctcccaggttcaagtgattctcctgcctcagcctcccgagtagctgggattacaggtgcgtgccaccacgcctggctaatttttttgaatttttagtagagatggggtttcaccgtgttagccagggtggtctctatctcctgaccacgtgatccgcccgccgtggcctcccacagtgctaggattacaggtgtgagtcaccgtgcctggccaaattatactctttgtcctggatgaacccataatctatcttcattctatctatctattatactaatctctacatggtcaaaacctacctgttcctcaactttcagcataagtttctctatctaagaaggcgtctctggttctcctgagaggaaaataacttttccttcttctgaaatcccgtatggagaaaatgaacccttaaagcatatgtatatgtttgtcagatgtctactatgtttaatgtacataaataattataaaacattatacattgactcttcactaattccttccacattaaagaagagaaagcaatatataagtttcagaatatattgaagattgtagagaatacctgttaagttactaaagaaatgcatataagggtataatctttaaaaattatcgcaacaatttgatgtacaagttatccccatttgcaaatgagaaaagtcatgtcagagagtttaagtcctttgcctaatgtgttaaaaccagtaaagtgaagtcaaaaattaaatatgggcaatcaagcaccagcacttgtactcttaacctcaatgctacgctttctgagttaatacacttaaaggccttggatgagcaagcacatttgagcacttaatattagtatacacgaaagtctgggtccatgcatatatgctatgtacatacatagctacatacatatatgctatgtattatctgactgacttatgctaaatatagacattctataaagcatcctgtcctaggtacatggcttatcactattttcctcattactacaagacagaggaaactctgatcttcttgaatcttgccatcttcctcaatccctttaagtacatactctcaatccccaccatctttaaggtgaataaagaatggcttcctaggagagtgtcgccaacaagcccgtccctccaggacataaagcagagcttttatctatggtattctctggttttcttgattaaagtgtacctcacttgtagctgcaggtgacagggatcaaattatatcagctattttagtgccaacatatctactgggcaggaaaacatttaatgaatgcttttacgtatttttttctggtattcattgtctttactgttactgtttctgtattattgatatataaaaactggtgaatagctaatatttaattacttctaatagttgtaattaataacttattttttgttcagttttaagaattcagtttataaaccatgatcttatgctccataaataaatttctaacagagagtagtcagaattgggacacttttccttcatgctgcaacctacagtaatttcattcaatcccataattttcagcataattatcagtacattcgtttagcaacaaaaaaaaaacacacaccactaacaacaacaaaaaaaatccaaaaaacaaaaaacattttcttttggccttttggtcattgttgtttagtgttactatttaaatcttttcatttttatatcgtttatatttccaataagtgagagccccagtagattcagaaattattaagtactgacgctactttcttcatatgggctctgttctcttttcattcctggttataactgtctgtacctgtattcatgatgtgtgtattttcttccaatgactcctttgcagttattaatgtatacaatttccatcacgtctttcgtattccaccactgtataccaaaagcctattttttaatctttttcttctttatccagatatcttccagggtaagaaagcgaaacaaatacgtttaagagcaacagtctttaatagtcataagtatatttttcgtgtatagtaaaataggacaagctttgtttaaaattttataaaaggtgatatgtactaagtttttatgaagatattttatttgcttgtgagacagcacaaagtacttgattggggttgtggtttcttatgctattgaggattttgtagcatatttaatttttaataagaatatgctaataaaagtatgtttccagcacaaacagctaaatcacagttgcttaaaattgtaataaaactagcttcctaataatagcatatgaattagaagaaaataaatgttacagactagaataggcaatggattgagttagaaaagcttgccataaactctgaggaagatttaggacaagtcactttccttctctgagtcatagtgcctcaatgactactaaggttgggtaagccttcaaaactatgtgatactgtaaaactccaaccttttcatctggacttgagaagcctcttgaggagacagtcaagactacctttcactttttttttcctaaactaaaattggactccaggagagataatactgtagtctttttctagctgtgacttcttaactgcttttttctcagtcttcaaattactctggcaaggaggcactgatgtcatcaagagatggggtcactagaacaccaccttttaaaattctaacctgtttttgtacgtagatgggatagtcctgggtgtaagatactaaatgtgttttagttatttcctccactgccttggccactggtcttttatgcttacgggagatgactggagcctcatctatgaggtggagatagaggtagtcttataaatttttaggaatctgttatggatgaagataaataatgtgtatggaatttaatgtaagtcccttcatttaattcaaaatatgcaaaaagtataaactatacattttaaagctattatatggtaaaaccaataatcccctgacatagacgtcagaaaatacttacaggaaagttctcaactgtgttttattcccagcttcctggttattatcatccaacaaataattttgagcatcagttgtgtgaattgtgttctgttctaaatttgcttctcttgaattgttttgaagcacccatgtgcaaaaggaaatttctagtagataaatagctatttaaaattatgtttggcattaacttgtaaatacaaataaatatcaaaagcctcaaaacatgaacatcacaggtgtggttaaaaggcaaatggtgcacagcattaaaaattcagttattttcattgatgttatcatagctgccagctcagtataatagaggctgagccaagatgcatatttaagaatattcaaagttagttccagatagccctaagctattaagaacctgtggtgtaatcagaaaagcagagtcagaagtacataggaagggctgttaatggattattaagagaagcacagaggtataaataggcagataattattggaagctgaggatggcttttgactgttttgactgcttaatggatcagaacatggagttagtcctatcatgttttaaagataccagccatctttcttgtctcctttattatgatagggtctggaagcaaaggataaaagttgtggaactcatacatgtatgacacttccaactttgatttctttattcacatttcttttcaacctgatagttgattctgctcagttttcagtagacatgttgcaccactgaggaagatattaaattatgtattttcctacactggtgcttatagggtagggaaacaaggttttgaatccatctgatacatgtaaattaggtagactttccaaatgatgatgtagaacattaaatatctaaggaaatgcaatgttaatattaggaaaatattttaatttttaatgtgaatactttcttgcttaatgccattatatatagattaacgtatatttacatagcctgatgaaaccatgctgactcaattaaaccaaactctagcaaagctaagacaatgcaatgtgagttttaagggtttcagatagctttgtgtgtatgtgtttttttattattattttttatctgagaaagaaattaattcagccatttaaactcattgactagaaaattctttaacaagcataggttacaattccaaatgctgtggatggttaccaataaaagaagcaggcatctgttctcagatgtgtgaagaatgaaatgccgcttgtttcattactcactataatatttttggtgtcatactatggagtcaaactgtctagcctcacggatatttgggaagaggaatcatgtttctctttctctagagaaatatcatggataaatatatctttaatagtttttggcctttaagtaacagtacttaagttttcatacatttttatgttcatgtcaaattataaaaaattaacattgattaagtattctatattttgctcttcgacaaattcattgttatgctttgtattaaatatgaaaatttaaaaagtgtatgcctagtgaaaactctaagttgttttcttgtagtttaaaaaaatcaaatatacttctttatgtataacaactatttgggggaaaatgtatgacataattgtttctctgaattaatttttgctgcttatgcatttaaaaataaactgcactataacagagtaactttgaaaggtaaaaggggaattaaatgactaaagatgaaaacaagtgtaatttaaatgttacttttaaggagaaatttatgtggaactgtggtttacgataattgttgacatattcccctaagtactgtgtctgtgatttttcatggtatcaatcatttaaagcaatttaggtaataacattctgacatgcatttctgctattttatttacaccatttgcctatatcattgtaatgcagtacctttctgatttggtgcagtaaatgcactctgtaatatctattatggcatggtcaaaggataatttattgtcaaatagaaaaataggtcaacactaatgtcacttgatgatcaacccccaccgctcaaagtttaataaaacatctcaccagtatgcattccagtgcagtggttgatattttattaggactacctggctatagcagtagtgtaattactgagctgtcagagtgataagtgggattaatggcagcctgatgcactttagtctgcagagcgcttagagaattgcaagatggtattattatcagagtctgcccattctggcatattcatgacaccaaaggaaaaaggaatgctacaattcaggtttgcgtggccctgcctcattaacatctgacattttcaacagctgttatttgtgaactagctcaataataaaaggagaattatttggtaaagaggcttaataaccacaactaaaaatccttacattgtcaatactgttaagtgaatctgtttatgttgaatataagatttctctggaagaacagaaaaatacactgcacattaatttggttcccttatatctgctgacattataactttattttttaattgtgttattattcaagttgggtgttagaaaaaagaaaagcagaaaacttgtgacttcatagagataaccagaatccatatgatgtgccatatatgtgtgtgtgtgcgcttacttttgtgtgatggcagatatttttacaactgtttaaaagactttttttcaacaataaggtgacatttaagttggcatattatttactttttagctattttgtattgcgacataaaagaaaatcctttcaaaccactattaatgctcagtatatttatccacatgacagttacacatataaatatcacctcattttaacatcaaggaccaaataggccatacattatggagctttttgtattgtttgcaatgtatgctgcagattatacttcgaagaaattatttttgaactcaacaatagtgtttcggggaaaaaacgttaagtatgagcagacaggaattcaactaaatgatagatgtgaatctaacaatggcatttagagaaatgatagggaagaggtttaatgactacatttcagagaggacaattgattatgaaaagcctttggtactcattgtgtaaaatttaatttagagagaaggctaagggcacaaaccagagaaaagagatcagatttaaaaacaagatattaattaggcactgagaaattggttcagacaatgaagagggctctcttactcacaaaagaatgacaaggagactggtattgttttcatgaaggaaatgaaccaaggtctttacacatggaagtgtatagaaaatgaactagctagtcacctttgtcactgagcaatgtaggattcatgctcagtgaaattcttggagaatgctgtttttctgacacatgtggcagtagtatattttctttagttgtctgtctccacattcatttctttctactcccactctcactttatgctagaccaaattcattagttcacctaccttgtcacgttcttttctttccaggcactggtgcatactctttctattcttgggtaattatcctgagtgaccctgcactcagaatcccactgtcatttgctttcctaatgtccactcgttcttcaagcttctatttcaatattattcctcccaagaagcctgtcctgacaacctccctccaggactactgtctttcatctgtgctcccttagcatgctatatttcacccagattctcattgaccacattgaccagtgtgtggctttttctgtgtctgtacttcattcaaactgcatgttctatgatggcaggaccatggtgatctttttccaacacttttatattctcatatcccagggtctgctatgtaatggaggattattaaatatgtattaaataaatgaataaatgaagaaaaacacacataagttaatgtgcaaataaaggatgagtctggccattggttttagttgtcctgaatgaataattatagaatgttgttctaacaatgtgcttccaactatgaacactagaatcacttcagaggcccttttcaaaatgcggattcccaggtcagtaacttggactcagtaggggctcctctgtgaagtctgtgccatttatcaagcttcccaggtggttcttaggtgcaacaaagtttgaatacatctctggccagtcccccggagaggagagtcagatgagattaatatgcaggaagtttatatgcaggttaacatctgtagaagagtgaaggaagtgggactgagcaaatagtcacaataaatgcttcaatggctccttgcagactagttccccaaatatgggaatgggcagagagcctccaaccccgctcactgaccttgaattgtatgtgtgctgctactggaaaggaggctgaccttgttggagcccattctcttcagcagcagagggaaggcagctgtgggaataaagctttggtcctgaagggtatggatctgggctatgctttgaggcatctgttacagaactcaattgtcctgtgaatgggatggaggctgaaagacttcagacaattggaaagagagagagaggtagagagggaagctgggaggaaggaagagtggaagaaaggatatttcaagtggtaaaataagactttacctttaatctttgcatttgtttaataattttggtctaaaagaattacaaaccttatcataaaaaactgcatgcaagtattgtcagcatagtgaaggatgaaacaaaactgatagagtgagggaatggtatgtcctaaataagtatgattctcttaaaatcaagaaggaactctgagaggagggacagttactagccagcatgattctcatttatgcatcccaagaggagtgccaaagatgaaacacagaaactttgtatttattgcttaaaaatgttttgtacctaaaaatgatacgattttatttatacttactagacacggactctgaatgagtataaggtagaaaatagattatctcacttatcttgtagtttcttaacatagttattttatttcctagatgcctgaaatgtgcagatgccccgtgtcagaagagctgtccaactaatcttgatattaaatcattcatcacaagtattgcaaacaaggtaaattcagatttaactctgcaaatgaaaataacagtatttgatcttgttctctattatctgtgggtacagaatacagcttgtcttagcaaatccagttaaaccattaaatatgacttctataggcatttaaaaatgtggcacatttattaattaagcacttccaagttgtgatttatcatgaaaatccaggttcattgttttttgttttgaaaattagtttgtgttaaaatgaatgatttttaaaattcaagacactgaaaagattgattttagtttatgcttgctaaatactaatagacaagaactgtcattgatcatcaaaacacatttatgatttgtgaaatatctatgaaagtgtgctttgatagtaagtctagcacatagatatatcaaggtaatagacttttttaactaaaattcagttaatatgtttaagacttgaaataattcataatgactcatagagttgtagcaaaaaaaatacacaactaaaattagaagaaaaggcttatatgggcatgagtagaacaaaaggaattttgatctttatttttttttaaaaatcaatgtaagtctaagcccagttttcattcactaagtgaatggttgattgattgaataattgatagtacctattgtttttgtgaagagagcattgagagctcgcccaagtgtctaatcctttaaggatgagcaaaggctgaacaatgtctcccataaagatacagagaatcctttcacaaggtttaacactaattttctaaaatgctgtaaagataccttaactcctcgttcttcaacaaccaggtgcctttttacgtataaagtttatttcttaatatttcaagtacttagataatttaggagaaaaatgataaatacttttatataaatttagggtcttgaaagaatttaaaaattattcctgcatggtcagatttaaatctgcattgtcagatttattaggatttgaagtctggtttgaatttttagataaaccgcttattgtgaaactgggggtaattacctccttactttcacttatgaaggaaaggtagcatctatcttacagagttgtagtataaactgaataatatttttatgtgaaaatgtctaatatagtgattactcaacaattttttatgtggaattattagtttccctattcattcaatatggtaaatactatagaagtgattgctgtttttgaagtaaactgctatttataaaatcacattttttaataaagatctcatcagaaaaggagaatccaaagattgaagtctaaagtattttcgctaaaaatatatctaagttaacactcttcatatcaagcatgaggaaatatgagaattatgacggactatcttacaagatccatgctaccccaattttttcatagatatttcagaatcagtagttattttatgagtacacacttcatttattcaaggtctacacaaatgtatagaaaaaaagacaaaaaggattcttaggtttacaaaatgtctaagcaagatcacagtcatctctatttttggaaatccactttctgtttcattaatttgttcatattctttacctaatggaacgttgtgcttagatatctatttaaaagatttttatatgaatatgagagatttgaagatgattaattgagaagataatatgttgtcaaacctcaaaaaaaaaaaaaactctcctaattttttgttgaaggatcactgtagcaatcataaaaggtcaaagactgttgttctttaaagcctgcagctttttagatatttaccagctgtgtacaatgtaggctgtcccacattgctttgccagtggacctcaacgcaggaggggtgttctttccaggttgagagggtaattgaatcgccagactcaatgagccttgcgcctctttgagaaaaggatgtcacttgttttgtattgtgttaggcttctgtgattcagtggagtttaggccaatacttccattctttattttcttacaaactggattacagctctagttttgaaaggtacactcaattctattgtcccccctcagtcagtttttctctgtttggtttgtgcaggctgttgtttgcaattgtatctctcaattggaagtacacatttcagattcatcaaacagtgaatcctgggttatatttcttgataggttttcttttaaaaaacactactttatatgagaatgcatgagatcagtctataaatatagtgaaataaatggctgttttaaacagtgttccttgatttcgtgatcctgtatttaaaacaatagagatatattctccttaaaacttttaaagtgtaagccatcgatttttccatgattttgcatgtgtttataaaatctgtgtaatcagattagtgtggcttttgtgtatagataaataaatgtatactatgtgttacagaaaagctgactaaattacacgatgtaaaagaaaagtttttctttgtgatagatccttattaaaagtaactggaagttaaagaaacaacaaaatcgaagcagcagaaattattgataataatgtttgcatttataagaaagttacattgatacgtgtttgtgtgtatgcatgtatgtgtgtgtgtatatatatatggttgagagggatatatattgtacatatattgtacacacacacacaaacacacacacatattacagctgttacaaagcagaaaagcagaaatgtaaccaatagatttggtgctttctgctttccagtttgcctttcagtttcaatggctgaatggtttatactcttatcaaacaaaatattgatcatttccagaataactttctaaagctttgctcaaattctgacttccttgctcagtaactgtagttactccccagtgcctagaaactaatgtccaaatacataatctattatgtaagttgattggggtttctcccactattatattaaagaagtaagtggaagaaaaaatgttggaaagtccgtaatttataacccagtaattttttaaaatgtgaagatttagatatatgcaacaaaaagtagtgataagatttcaggtttcccttggtacaggaggtcatttccttcatctttattgttggataataagtatttacccctctatccatttaaagagtattgacttatctatctgccataagacagtgctcaagagaacaaagctttaaaacaaaacaaaacaaaacctctatctcctttgaccagcatgtctccaaagttatagaattacagttaggaggaatattttagaaaatgtccgtaatagacaactatatagaaacggaaagtagataagtgatttcctgggactcggtttggagagttgggcaaaaataggtgaggagtattttataaaagtgggtaatgactactagtggtgatggagtatcttttttgagtgattcaaaaatcagtgttctaaattaattggtgtacatatgctatgtagattatatcttaataaagccctacacacacacacacacacacacacacacacacacacaaatgcacacacacacacccccacctctatctctgttatattcctagagggtacacaagccataatcctgcagagttgctgagttgagtatgccatgtgatttaaataagtaattctgaactcgtgccagttttcattacagatgacctgccaattttggcctatgtattatgggttggtttgtgtcatttagaatatcaatgtgagtgggttttgtgtcatagaatgaggtttaattctaattacctctttccacgttacaagacgttctgtggatattaattctctcttttaaaatttgatgagagtattataattgctttatttagtcaatattggattagctttattcatatttttgtcaattttttcagtgttgcaatttccatgtggaagccgttctacttggaataaataaaattttattcagaaagggttttttttttgttgccagactatcttaatttttgtttctgaactatttttatttccattttttttacttttgaaaagttttttcactaattatagaattcagggttggcaatgattattattatttttccacttcatagaacttaccattttggggccttttatcatacaatgctactattgaaaaatgaatggaagtctaattattgttcatttgaggttaatatgcctttggggtgctgttttaaagatcttttagtttttgatgttaaacaattttaccatgatttatctaagtccatatttctttttatttgtcctacttatttttctttgcaattattgaaactggattgatttctttcatcatgttgggaaatatctcactgtctctctttctttatgaagctcttattagatacatgttaaatctttttactttgttctcaatgactcttaggtttcatacatttgtctttttatttacagtgtgggggttttattatagataatttccttcaattctgttttgaagtttactaataatttcttcaccagtttcaaatatgctgttaaaatggtccattgagttttgagctacaattatatctttcatttctaagagttttttgtgctttttttctaatctgccagctttttattaatcttttcaagacttttattgttttatttatttatttatttatttatttatttatttatttatttatgacagagtcttgctctgtcgcccaggctgaagtgcagtggcgcaatctctgcgcactgcaagctccgcctcccgggttcacgccattctcctgcctcagcctccagagtacctgggactacaggcacccgccaccacgcccggctaattttttttttttttttttgtatttttattagaggcagggtttcactgtgttagctaggatgctttccaactcctgacctcgtgatctgcctgctttggcctcccaaagtgctgggattacaggcgtgagccaccgcacctggccgccttttatttcttaaaacttaaaatattcgttttcatattctgtcaattttactattaaaagtctctgcgagtctgatgatactgtctgtgctatctgttgcctccactgagtgctttgtgttcccttgtatgttcattgaatttttattattatttttttactctgtcatttgtgttgatgccttattggaggaaattctctgagaactgtgaagcatgcatgtttctttacaagggatttatatttgcttccctcaggcagtggctttaccgccagtcctctgggaccaccttaaactaaattcctcacttaatgttttttttcgagtcaccaagattgtgtgaatcagaccaaaaatacaaatataaatttaatttgctaaggacattattttccctctttttcttgtgtacccaagtttaagactgaaaagtttctgtgcagttccaggtgggacctaggtggggttaattttaatttctctttctggtgatgtggacttacacaatcctagttttatgattgagtcttatgttagactcagactttaggtgggccttgagcttttttttctaaaacctatatgcttggagacccttaaaacagaagcctttgtttacatggtttggcaaatgcctttaagatgattcccactgatttctctggtctacttactgccttgttattttcagtccttggacatgcctattcatgacttaaaagctattttcctataattttaatttctaattagaagagtcatggcagataattagttttcaatatgccctggaaaagtgcggtagatatttaacaatgagtggatagtctaaactgataaaaaacccagagattttgtaggaaaatataggagtagtaattggggagatatatggaagaaagaaactttaaaaaatgaagacaaaaaagatttattatatcagatactgatactacaaagctactgtaatcaaaacaatgtagtattggtgctggaatatacatttctcaaacagatgagagtctataaatagaaccaagtaaatatgagtgtgtaatatataataaggaggacatttcaattcagtggaaaattaattacttcttcaataagtagatctggaataattttgactttacttttagaatctttcataggttatctcctagaattcttttcaggtggactaacctagatattaaaagtacatatttaaggataagtttaattacaagcagctataaaatatgggagaggacattttactacctgcattttaaaaatatattttaaaataaaaactaaccacacttgaaaccaagtgaaaaattatttgccatgcatgtttcagtccaagtgttaacatctttgttactcaaagagctcctgaaaatttatatgagaaggataactcagtgcaggcataggcaaaaattttactattatagaagtcatataagtgactattaatcatattaaaattagcctgcttgcatattagtcagtaagatgtaaatgaaaaaatgagataccagttttctctcatcaaattgttgaagttgaaaagtaaacccctgtgttactcagcaggaaggaaagaactttgatatgatggatatatatttgagaattaaaaatatatgtactgtttcaccagcatgctttattaatttgttctacctagagaaataaagtaattacaatgtaaagggacacatatacaaatatattatttaaagcaattatagcattgtttgaagtaataaaaacgggtgaatactttagtatcagctcaatctattaggctatatttatattatggaaggttaagaagcaattcttaaaattgcattttatatttattggtctaaaaggatatttgtagtaagtgaaagaggacaaattgcatagtaatgtgaatagtatgacactacttttagaaaaaaatttaatctgtatataaacaaaaaaggggaggatgtaatttagtttcttcatttgattgaggttagtgtagggtgaagttaggtttctaacattttccttataaatctctaaatgactttgcttcttataatgaacatacgttttataataaaaacaatatattaaaattcagtagtaaaattaaataaagtaaagctgagaggtttcacaatagcacatgacagaccctattctaagttttcattgtggtataaggagtgagaaaaataccaagattttcctcccagattgctaaaatagttccaaatatgttttttgaataattactctagtatactaatgccacctttattgcctatttgattccatatttatttagatctattttcaaatcttctttgtcctacctatctatatgtaacaggaccaagctgttttaatttctttgctgtgtagtatattttgttattaactaaaagcatctccttgacattacagttattttcaaagtatcctagcttttttctgcgtgtaaaactagctttgtaaactgaaagagttctacagaataaatattgagcaccatgttcagactataataaaatattaatttctaattattaatgtaaatgtatgcccaccttgactcattcatttattactaatgttactgtagttaatgtaactattaactaaattttccagaatccagactttaattttaataaatagcttcctagtcttgaatctggcaaattgtggaatactaaatttactagagttaaagacaaaggactggggtattattgttaaaatatcacatcttaattgaatgtatggtgtgaaaaggatagatggatataacattatctattgagtcattaatgcttatataagatgtatcttgcttctgttttgatatatatataacttcacaaggttacatttttacttttttttttttttttttgagatggagtcttgctctgttgccagactggagtgcagtggcacaatctcggctcactgaaacctcctcctcccgggttcaagccattctcctgcctcagcctcctgagtagctgagactacaggcgtgtgccaccatgcccggctaattttttgtattttagtaaagacgaggtttcaccgtgttagctaggatggtctccatctcctgacctcatgatccacctgcctcggcctcccaaagtgctgggattacagctcccggctcatttttacttttaatcacagctgatacaatgtgtaatagtcactgattttattcacttttgctttaatagaggaagttcagatttgaaaagcctgtaagctcaaagcaaatgttagtcaattataagttataaaatgtaaacaactataagtccaagagtcatgttagtataaatgagaaaggatttttattatacatcttaagccagttttatatgaaacgagtaacatcatattgtttgtggttgtgtatagtatagacaaatttaaacatatgcttttgtaaatatttgataaaatttaaattatttttaaaaaacactaatgatataaaaactaaatatatataaattaaattggaatcacaactattttcttttacaatattaagacaagaaaaatctgtataagaaacacataggatactattttgggtattttttaatattaataagtaaaagtcaatgtaacagaatatagaccaaaagaaaatgtaattgaactaggcatctcattgtatagaaaagaaatttgaaacccagcaaagctaatgacacagctgcttgatagtataattgaattttctagatttcttgttcagtgtgcctttgtattacactatactatcgatattaacaaagtatgcagattatgaaatattattaaaatataaaaggctggaacatttgctatcatgaccaaattttgtaagtgctattaacgtcttgaatgttgagtaaaaagtataatgtaatagacttcatgttaaagaaacttgagtttagtttttttgaaaactactttgaaaaattaaaatttttaaagtaaattattagaatcgatactaattatattttgaagctattaatgggtttaaattatgtacttagaatggaggcttttttgaaaaacccttttatttccactgtagaatataataacacactgtactatgcatcacaacagtctgtcaattaaggaattgctcatattctcgtcaataaagagcaaactcgcacaaaatagtctgacttttttgtatagaacaaatggtgtgatattacagtctagatttaatggcataaataatcatgtgtcttttggcatggcataaataatcattaaagaaaaagttttcagcattttatatgtaagttatatatgtttgaatatatatatatttcacattaatatgagattctttgattaataatcttcacctttcaataatttctcaaacttaaagattctcatttgcttgcaagctgtgtaatattcataaatgaaattgtagaattctttcaatacccaatgctttttttttcaactctaatgatgactagctttgacatctttgtttttgtatttgtattagtgtttcgatgtagaaaagtatcctctttgaagcaaattgtagaaactctactacacactaaataaaatagtatttcatctttttctttctctcttcaaatttaataacttactggaaatgaaaaacttaagcctctaaatttcttataaaatttattgcatttataattattttccctggataaagtggggcttttataattttaaaatatatattcatgttatttaattgataattcaaaaactataaagcactttcttatttttgccttttatagagattttcattttcaatattaaaggataagtaggccaggtgcagagactaacgtgtgtaatcccctcaatttgggaggccgaggcggctggattacttgtagtcaggagttcaagaccagcctggccaacatggaaaaatcctgtctctactaaaaaaatgcaaaaattagccgggcgtgatggtgcatgcctatagtcccagctacttgtgagactgaggcagcagaattgcttaaacctgggaggtggaggttgcagtgagccaagatatcgccactgcactccagcctgggtgacagagccagactctgtctaaaaagaagacgataagtagtaatcagtagttcagtttctagtattatatatgtagttgcctatatgcttacagccaaaaggggttgattagacatgatctctgacattaataaaagaaaaaataagacacgtcataaaaatataagactaccgcaaatatatattaacaaacacaatcatcaaaaggctgttgtacaaagtgctttctggcattatgcttccaattggaaaaaagctgaagtattgataaaggtctttaaaagaaatgttacctgaaaagaatgggttttgatacagatgaaagttttatttcatttagctagaacaatatagaggcaacaatattgattcttcattcatatctagtgcttaccaaaagcgctctcacatatttgatgaataatgaattgaatacatgtgcacacatagactaagttattttgactaactcatggggaagattgtaagttctcaagttcattaaatagagcagggaggataggatgcagaaaataggagtaatagaagtgacttaaaatttatataggttctatataaaaaatttaccaccattcatatgcccccatgtcattgatattttatggtttggtagattagtgattttctgtacatacattttgcttctttctttctgtatttcttattctacttcctaacatggaatatttatttaatatttatttagtaaatattaaaatcttaaactcacagtattaacatttaacaaaatctttttagtgacaaaaagcctaaaggggtagagtgggaacctaagttcactgaatctattgtatagtacataatggaataggcatcttatccatgcacagttaaaaaatgcataatataaatatgcctgacgaagaaggaattttgatcttcatgtctcaagtgatgaaaccgaggctgagagatatgacatttccccagtcatattgcttgtgcatagtataagcagaattcaaattcagttgatgacttcaaagctcgtgtacgtgtgtgtatgtgtgcacgtgcttgtatgtgcctgtgtttttgttccagttaaatatctcaggatcaataaaaacgttatcttctacaagaatgattattaatttccttacatgtataggcttaaacgaggctcactgaaccaaatgtgtagttctaaaaatgaatcatattgtataaagctgatctaaaatgtggtatatctaagatatgaaaagagaatttttcagaataaagctagtcaaacctattcttctatctccattttttttttctgagagtatgagtacgatgagggcaggaattttcatgtgttctgttcacaatatatctacattcttctttgccaaatatctgaggacccacaggttgttcattgagggatggtgacagcttgacaaaaagagtgttctgtgtgcatgtactttctgtgtgtggtgctagagacattttctattcaattaatgtacatcagtacattcaccattacagcttgagccagaaataaaagtaatgttaattcacccttctcacacatgcaaacttcttgaagtttagcccaagtgtttttttaaatgcagcagattggagtttatcttggaagggtgcttccatctgtgaaaactgtcattggaagaaggaagaacactttaaaataaatccaccagctgtattgataatcttgtagtgatatgaagacttgaatatgataggactatttgttaaattagttataccatatgacagggtagcggcttgtgagttttccatttcttgataatgactttggaaatcattaaattgtggaggaatgacactaatgcagtttcatgctgtaattttaaataaaaagcaaagtatagaaattaaattattttaaaattaactcacctaagtggcacatgtcgtgcctatagacatgctttaaataccccaaggactaatagaaaattcaacacctgcaaattgtgggtaaattagtgggccaaagaacattcaatgcctaatgtgttgatttgaaaacagcaaacatttcaaatattatttttgtctttagatttttgttaggagaaggattgaaagtcttaatgttttgtacataaaatatctctatgcacaaaaaaatcagatatgtattttgtatccctcctgacatagctctgtacattttttcctcacatgatggaacactgaaatgtttgtgactgattgaataacatgaaccagttgaagtagtgtgtattttctagaaggagactgctggggtgtctataaagtacccttctaaatttaaattttctagcctttacttttaaaaagaatgaagagctcacagaacagaaatcaaacctcttatgtagaaggaggactcaagaaatcttcccacttgctatgagagaataaattgatactgatcttgacattatctgtgggaagaattgaggaggtgttcccctcctaataggtttctgagtgtctttggctctgagtactaagatccctaaacaatggagttatctaccatttcttcaaagttatttgtaatagatagattgcaaaggtgacttgtgaatcattgcttaatattggttcaacccattttcaaaatcatgcttctttattctgtgaaacatgcctatgctttcctctttctaggcatcattgtgtaacctctcttgggctccctacctttccccttcctttctgagaatttccacatcatctattcaatatttttcttagttagtttcttaatactggaacccttctattaaaaagctttaattaaatagtaatccctcagcttgccagtcagaatcctccataatttggttcatgcatatttttcaaatatatcttctaataatctttcccaagtgaatgaattacctcagccaaattgccaagtcattacaccaaaccctattgtgaactttcttgaatatttactcatatcaatcaagaatgatgtggctatgattctctcttatcttagacaagtcacagccagaatcattttgactgttacccatttaatgctgtttctggacaccttaacctgaaatgacttcttactctgatgctaaagcatcttgatatcaggaagcatatacttgtttttttcaaaaaaataaacatacacataatgctttatatttagaagacattcaataaatccttactaacttaaaacaatttttaacctcctacaaattttattttagtgaaagggttttacttagagtcatgagagtgttaagaattattagacaatttcatggcagtagtagatcagacactcatagtttgacagctatagaaaaatcatgagccataagtataactttaaatattttatttgttgcaatttttcaaacgtgtctctttttcttcttgtgatatcattttatgtgcaatcttgaagctaatttggggcccatgaaacaatcaatattcttgtggaaagatacttaagtgtttaattggattatgttttttttttctgtgcttccttaccccaagtatccttaaaagtggtctaccaattgcagatcacatttttttgcatgatactgtttttatattacaaggacacttctaattatacaatgggaattttgagtcatggagtcagtcaaatatttgttaatgaatcacatcaagtgtttctgtgatgtcatataagaggaggaaagaatactgacagtgactttgagattatttctaacaatgatgacctgctcagttgcttttactaagtgaagagatcagtgggcttcagcaggaactaaatatgtttgcttaggaatagactgattaattctgagttagtaattgctcattttcattattattaagtaaaattatccaaaaccagaaagtcaggtcaaggagatgactgtgtctttttattatcatactaaggtattctttaaatacaagggaacaactaagtactatttagttttctaggagaaagaaccattggctcacttctgtatttattcttaaaaattcaacctatgaatgtacatgttaactagtagctttgtgtcaagtagagatgcaatttctattcagaagaaaaatgattccaaaagttatgttttattgccctacaggtcattgcctagttttgtatataatctagctattttatgcaattattcctttattaaattgagtatataattcccactcctttaaatgcatgctttaaaacataacagcttttatgagatgtattcacttcccatgtatttgttcatgtaagtgaagttgacaattcactgatgtctagtacatttgcagtttcaaccatcaccacagtcaatttgagaacaattttatcaccgctaaaaaaaacctccatacttattagcagttattgtccattccctctcagacccccagatctatgatttacttttagttcatttttttgtttggtgtgagatagggtcaaacttcattcttttgcatgtgaatattcagatattccagcatcattcattgaaatgaatattctttccaattgaattgccttagaaacctttttcaaaaattaattgaacataaatgtgaaggcttttatctggactcatatttatatcacattgatctacatgcttatcctcatgtcagtaccatactatcttgattatgttagctttgcagtaatttttgaaatcaggaagtgttagtcctctagcttcattcttatttttcattttagctattctggatcctctggattttcctatgaattttaggatcagcttgtcaatttttgcaaactcagctgggattttagtagagattgtattgaaattttagataaatttggatagtatcaccatcccaataattagtcttttggcccatgatcatgggatgtattttcatttatttaggtattatttagttcctttcaacagttttctatagttttcagagtataaatttgaactttttacagtttttaatacatatagttctgaataatttattttgtttgttgctgttgtaaatggaattactgtcttgattttatttttcgtttgttcattactaacatattgaaatacaattaatttgcattttaatcttgtatcctgtaagtttgctgtacttttattacttctcatagtattttagtggattagttagggtttgtatatacaagatcattttacatggaaatagaaataatttttccctttccaatctggataactttctctctctctctctctctctctctctctctctttccttccctccctccctctctccctctctctctcttcttctctatctctatccctccccactctgtcacttcctccttccttttatgcctaattatctagcaagaatttcaagtgctatggtgaatagaagttgtaaaagttagtgtgatggctgattttatgtgtccgattgattgaacctttgtgtgctcaagtatttggttaaattttatcttggatgtttctgtgagagtgtttttgaattagattggcatttaaatcagtaaggttagtaaagcagatagccctcccaagtgtaggtgagcctcatctaatcagttaaaggactgaataaaacaaaatgctagctctaccctgaaaaacacataattcttcctgtctgactacctttgaaatgaaacattggctttctcccctactcttggactagaactaaaactaaaacttaactggttctcaggccttccaactgagacttgaactaaaacattggctcttctgtgtctccagctggcagactcaaattgcagatcttggaaatttgcaggttcttaattgtgtaccagtttcctataataaatctcatacacacacacacacacacacacacacacacacacacacacacacacacacacacacacccccccccccccccacatacatcctattctttctgtgtctctggagaacttttgactccttgactaatgcagtgaacattcttttcttgatattggaggaaggcattcagttttcaccataaagtgagatgttaactgtgggtttttgtagaggccttttattaaggtgttgaagtttctttctatttgcagtttgttgatagcttttgtcatgagggatgttgaatttgtcaagtgccttttctgcatcttttaatatgattgtgtgattttttgtcttttattctactgatatggtatattttgatataaaccaaccttgcattcctgagataaatccttcttgtatgttctagaagtatttgtcagaaattagcataaattgttattatatgttttatacaattcaccgattaagccatggcagcctcaaatgcccttgactcagattttactatctttattctgtatttgttaatgaggtaaatataatctttcacacatttttcttctctgtgtgtaagatatttctgtgttgacttttggatattatactttgacagcttaatgatttattattaacctcttttagagacactaccgaagactctgacaaacacagtggtaaatctgatccaatttgggggaataaacagatcctaatctcttgattaaaagaaacagacttttaacttattaagcttttcattgaactgatggaaagaccacaactaaaagaactatgtaataaaaactacttaatataaagtgtaatgaatcgaatggactagctatatgtcctccagcttatattgaaaagaacttttgtgtgtgtgtgtatgcatgtgtgtgtgtgtgtttacatcaacatatggaccatagctgaataagatcactgtaactagattctgtaatctattgagccatgaacagtatgctttagtatgaatcctgtctctgccacttatctgctttatgatcctttgctaattatttaccctttatatttcagttttattgcttgtgagtttaatttcataccacattcttactgcatattcagaaaatatatgtagaagaaccattcttacatggcagacataactttcattgctgaagggacactgaacaagacaaatactgttaaaccaccacgaatgctgtgaaagccgtgcattagcttttattttaaaatgttcatttacttctaaaatatcagtttgattctttttaaacagattccagtattctggtgctattattaattgtttctttttttgtcttttcttttcctgaattttcgtcaaggttatttttaaaagtcttttattctgacttaaatttcttgattacctaggagtttgcttattttatttattgttttcttattattatcaggcgtttggtcctgtctcttcttgcatctaggaatttttgatcgagcaatggacatcctatatagtgagagatgataacagtaaataaaataattggtgctaagagtaaataaaagtcttttaaagtgctggggatatattaaagagtcaataaatagtaaatgtcattgttcctttttgttatcatcagtattctgtaatcactaggaatctgtacttatgtctgaggcttttcatggaagcaacgtctgtgctttcaaagaccttcaaaattattacaaataaaagccaaaggaaaaataaatgcaatatgtttatattgttaagtgcattctatcagctctattcttaaaatgtattttagagcagttttagatttatggaaaaattgtgacagtagtacagagagtttccatatgcactcataattacccctattattaacaccctacattagtatggtacatttgttgcagttaatgaaataatattgatatatgattattagctaaagtccctagtttattcagattttcttaatttttacttttttttctgttccagtatatcataaaaatcaccacaatacatttatttgtcatgtgtccttaggcttctcttgtctgttaaaatttgccagacttttcttgtttttgatgtacttgattgttttcaggagtactggtcagatgcaattcttccttttgattagaggaaaacattctcccaaatattcagcttattattcattcttttttcagaaaataatatgttccaaaaataatgaaagctctggctgcttttaatttagttaaatggaggataacctgagtataaccattttttgttgttttaaagtttaggttttgagtttgttcaaacaatgccatctaattttcatttgttaaaaagtgaaatgaataatttttgacaagatatagttagatgacttgtaaatgaaaaccatttacagaacatttattatattttaaacttcagttttccaaaattgattagttattcatttatcaacatactgtgcattgaatattcctatgtgtcaaatactctgctaagttttaattgatggttcctgatagtagtattgaaacctatgcatcttatacacatcattatcttcaatctgattacctagtagaagaaataatgtttgtcgtaatttggctgtttaaagtatatttttaagtagtaaaattttattttgtattaattttgcagaactattatggagctgctaagatgatattttctgacaacccacttggtctgacttgtggaatggtatgtccaacctctgatctttgtgtaggtggatgcaatttatatgccactgaagagggacccattaatattggtggattgcagcaatttgctactgaggtatgtatgatatacacgtgacatccccccactaccatcaccatgcacaaatatcttaaaataactttaatccttggtgctctgttgatacccaacatttttagtgtgacacacagctcaagtatgttttgtacaacaaactttatttttattcagcagcttagctacaaaaaggaagtgtataaaaccatatgtcaaattagttgcaatcccagcaggttattaaaatactttgactgaaattatataaattagatgatccgaaaatagaacttattcattaactttatgtggaagtatggcaaggagaccctcttatgaaaagactatcttctgtaacagattattttccctgaagctctccttaatctttaaagcttgaaatacagcatatttcattgtattctttgagtaataatgttagagaattttcaaaaaccctgaaactaagtaatgttatttaaccacattaataatgtcattagattttgtgaacttatagattggaagcaggtcttttatttgggtaaaaaatgtataaggaaataaaatgagagcacttttttttctgtttatcccatagactttgatcctggctttctctttaatgaatcatttgtaaagactttgattcttcagacactcttgggctctctgacgtctcctatttggagtcaacaagcaggttaattcccatgtatcatttaaatgatcagcttatatgaagggtatagtaagattttataatctttggagactagttggctagaaggtcaaattaagtgcccgtcaacctagatttttagttaatgacttactgatctggttttgtcagcataaacacaatgtgttctttcattttgggacccttcccataatattcctcaagcttaagtctcactttgctcttagtaataaatcagggttattcccttcctgctttctgacaggttaattctaaagaagagctcctgggaataagaaaataaaaacaattcgaggttgtggattgttgcaataaattctgggatttaatttcttttcttaccaaattcaaaattgcattaggcttacctgaccactacgaagtatgatctttactacctgtgaaaatccttagttgatggagaagattcacttgaattcctcctcacttttctttggggacccattgcctcttcattaaaccagggcaagctttcacagatgcagtaagtgaaaggtcacatagtatgtatatcaactaacacagcattttaaaacaaaatgaattaaaatgatatcattagtaattgatctggtcatgagaggtgtgtgtgtttgtgtgtgtgtgtgtgtgtgtgtgagagagagagagagaaagagagagagagacagggaaatacattattcctctggaaactctcacatggttttaattcttttctctgggaacactgtccctctgggaactcttacttggttctaccactcattcccagagcagagtctatttaagacagagacatgtgccttcagaacagaatttattagaaacttactaaaatttgagagtggtcacacttaggtcttgccataagtatcacctaatgaagagttatgcatagattaggactgcagtagatgcattttaagtgaatcaaggaatttagaataggaatgtatctgcttatttcattccaattatagtttgtataattgtaatttcaatatcaaattataaattaaaaatgtcctcgtgggaactactgagaaaagctttttgtccttttttttgggttggccgattagggtgcctgattttagaaagtcctgtattccctaggtcagtgtgtggtttacttaaatttacccaactgtcaaagttattaggaagttaaaaaaacaacaaaacgagtaactccgttttcactgatattcacggaaaaaagtacaaaatgcgaaatgttattctttcaaactactattgacatgagtatttaagttgaagtgtaatatgatgcaaataattttatattttgattgtttgataaaacaatgattgttttttgacctttaaagaaatacaaatctattttttcaaccaaattaagcaaaggttaggaaagcagattacaatagtatggtatttttcaaaattgtttttcctgtgacttataagtgatttttaaaataccaactcagtagtctgccattattggttaggtacataccttattcttctccagtttaacatgagcatgtgatttggagggaccatagtggaaaaggaataaatcacatgatgcatagccttatgtagaatcaggaggccagctgcttttttttttttttttttttttttggcagggttgggggtggatcttgtgttgtcattcctattcagccttttgctgtttccacatttgcagtgtgaaaaagccaccttccttcacacactggtgtgttcatgtagtaaacaggctaccggggtgattgtgactcactctaggaggcactttttttccctagtaatattttaatcctatcatgacattgtttcaataaaataactgggaaataatagtttagtatagattttatcagtcacatgatggtttttgaatttctctgcacaaatataacccttgaaaattttattttgaaaatatttgtgtatttattggaattttgaaagaattatatattatttacatttaatagaccacctagactctcattgcctctgaaatttaattaatgaattgttggaaaagcagaaggaaatgagaatgcatctttctacccattgcctaaagtttgaaaaaaaacgattttacatagaaaattagctgcatgtcaaatcagttctcttctactgattaaaaaattatggaggcaatttagaaatattaaaattaaaaaatcccagtcttccaggatttgtgtgtcaaaatgaatgagagctggaaaatttatacttaaaattaccacctcaattctgaattttcaggaatatactggattatgatattgacatctaaatataaaatttatttcacaaaaacattttataagatttttctgatatctgtgaaatataccatcttatgatatatacctcttagcactttacttatatttagattttatacttttattgtactaatacccagaatctacaagaaactcaaacaaatcagcgagaaaaaaaaaatcccatcaaaaagtaggctaaggacacaaatagacaattctcaaaataagatatacaaatggccaccaaaaatgtgaaaaaatactcaacatcaccagtcatcagggaaatgcaaattaaaaccagaatgcactaccaccttactcctgcaagaacgatcataatttaaaaatcaaaaaataatagatgttggcatggatgtgttgaaaagggaatactttcacattgctggtgggaagtaaactagtacaaccactatggaaaacagtgtggaaatttcttaaagcactaaaagttgatctaacgttggatccagcaatcctactactgcgtatctacccagaggaaaagaagtcattatatgaaaaagatacttgatcacacatgtttatagcaacacaattcacaattgcaaaaatgtgaaaccagcccaaatacacatcagtcaatggttggataatgaaaatgtgatacaaacacacacacacacacatgcacacacacaccatggaatactactcagccataaaaaggagcaaaataatggcattcgctgcaatgtagatggagttggagaccatttttctaaatgaagtaactcaggaatggaagccaaacatcatatgttctcactcataagtgggagctgacttgtgaggacacaaaagcataagaatgatacaatagactttgtggacttagggggaagagaaatggtgggtgggaggatgagggatgagacaacccattgggtacagtgtacactacttgggtgatgggtgcaccaaagtctcagaaatcactactaaagaacttaccagtgtaacaaaaagtcacctgttccccaaaaactattgaaatatttaaaaatgtaagaaatttctgtggttttaagccaaaaaagagaatggaactgacaagcaattgtagatgaaatcaggtgactcattcagaaaagaggtatctgtagattttccttttttatgtttttaaacattttttttattttactttttgtctctcagcaggtttctaaactatcacctctcatttgactttactcaatccttgtcgtatcagcatatactatttgcagtaatgcaataaatactttgaaatatacaataaataattaactacagttacactattgtgctactgaacagtagatcttattccatgtaagtgtattttcatacccattaactatctggaattgaattggatttttcattaacacaaataaatgacaaatgcttgaagtgttggatatctcaagttaccctgacttgatcattacacattgtatgcatctatcaaaacatcacatgtacaccatacacatttgacactaatatgtattaataataattaaaaataaaaaataaaaaattgaattttttcatgtaattgataaaatgtattttgttttatttgctttagattgaacatatattatagataaaatgctaaaggccatgatattcccttcccaagtcaagcactctgattcattgatgaatatggtctatgttttatgtttcctaagaaataattgtacaaagaatgtggaattctcaaatgaatgttgaagtttagaaactttctcatctgtttattgaccattcatcttcctcatctttttttaaaaagtttattctttgtacattgtgtcatatgtgtggtgatggagggatctagggatataacacacccaccctggattctctacagaaagccagttaactcaattccatttattgtgtagtttgttgtttccacactgatttgtaataactctgattttatacagtaagatcatatgtatgaatttgtctgcttttgtttttttggcagggtttggagctctattttttttacattggtctatttatgcatccattcactgacacaaaatgtattaattgctacagttttatatttttatatatgatggggtgttttattcttgatttaccattttcagaattttgttaactattcttatgccttaataacatgatgatgggatatttcttaagggttaaagaaagaatatactatatattccaagggactgtaaacatttatttctatattttatcaagggtagacacagtttgagttaaattagtctggtaaatatacactaatacaattaaaaatgtcaagtgttatgagactacattagagaacatttaacaattatttaaattacatcaacatttatgttttgcttaaaaacgataataaacagttttgaagaattgggaatggagaaggaacttgttcactcaaattagtatatgattgttttaatagagcaaatattacttctaccatatcttcaccttggttatggcagtcactgaaattcttaaacttttgtattctacaactctattttaggagaacatagacatatgtattctaatgaacaatagagtattgcaggtgtgctctgaaataatgtatttctgtgataaatttcatctatcaaatagaagagtggagacagaaatattaagtgcaagccccgtattaaaaacagtcatcaaaaagatgagtatttgtgcataaactgaaaagtgaggttggaaatactctagctgtgtattatgttgattgctttataagtaagatgatcaaatgaccgagataggttagataatgatcaggacattattaataatcagtccagtacagcaggagtaaactaacaccaccccaggcaaactggcttatgtgaatacccagtgtagtaagagcccactaggtaaggattcagttaatcaaactaacattgattgggcattgatcagcactgtgtgttgttgtagactgcttctttactacaagtcctagggaacattgtagtttctcaggaaataaagccaacaattgaaataatgtagtaaatgtaatgagacatataggtttacattggcatccttggacttattgtccaatcttcattaatttttgtcacatggttttggaggtgattagaccttagtgcaaagaaaagtatcaggcaaggagaaaatgcagttatattgtactttgcatagtgcttcagtgcatttttgtaatatctcactcaaaaatgctgataaacaacgcttgagggcatgcaaaccaggtaatttttttcccattttggacataaggaaactaagaatcaaagtgattacaaaatcacagctaatgttaaataaactcccagtgtcctgcacaatgttgagtactttatttagagcttgattaatcctcagaataactctccaaataatgttattatttccattttacatatgagtaacaggaaactccaggaaattaattaacttccacaacctcacatgtagtgagaggcaaatctggaatacaaagctagtggtttaattttcattatttcacaaactcttacttgccccaggtaatgttactagtcaaagacagaggcgctcaatgtaaaccctggttttctggctgtaaggccacagcagtatctgttgcatcttctaggctagccaaatatacttggtcaccatacctcacaagtccttgtttttctgttagatatgaagctactacattgaaataggttgggtaagaccaacacatacggcttagttgtttttttttttttttttttgtcttttcttttttaacttctgtagccaggaatgaatcttaagttttatggggcttcagataacaaaatgttgggttccttctttagaaattacattacagcactactgaaaaatttaaatacaaggccttagaaggggtctatatgggccaggcgtggtgggtcatgcctttaatcctagcattttgggaggccgaggcaggcggatcacaaggtcaaatcaagaccatcttggccaacatggtaaaaccccatctctactaaaaataaaaaaaattagccagctgtggtggtgtgcacctttagtcccagctactcaagaggctgaggcaggagaatcacttgaacctggaggcagaggttgcaatgagccgagattgcgccactacacaccagcctggcgacagagcgagactccatctcaaaaaataaataaataaaaagggggggtctatgtgacgaggagccttgaagcgttaagtgtttatctgcagttttattttattttggaatgcctaagtatgattttgtgaaagctggtatacaaataaatttaggaataaacctagcacatttatgatacagtttgacaaactgatcaataaaatctatcagttcattttgtaatctataactaagataaattatcatgataatgaaaaattactaatatatatagctaataactttttgcaggtcatttataaataggatatagattaaactatatttgttagattaatgatatatcacacttgccctattatcccaaagttttatcactttaaatgggatttctctatactacttctatttaaaatagtactattcaattatttgtgaatgtctttaaccaatacccaaccctcaaacacaaaggtgaattatttctgagagaagtaagatatagatgaaaaatatgcattaagcactaataagataaatattttttaccctggtaaaatgtgtctgtctggaatgcaaatacaagtaacatctttgaagatttgatttgtgtctctccttttactcttaatgcagtgattaatagaaaagaataatgtcttgatagaattcactaaatatctgacattcttctccaaaaatctttagaaatctattaaaatattccttactggcacaatgatttataatagaactgtggggccagatgaattgctagatgatttttattacaatattttagtttgttttaaaactgtatcttaatatctaggacttaaaaataagctaccgtgatttgggggcaataactttgaaatttaacgaaatcgcatggttaaaattatttgcggttacttttttctacattagtttttaaaaataaatgtaaatttatactatttcgttgccaatttacagttttaaaggattcgttggtttaagcttcaacaacttaaaaatgtatatactttcataaaaatatttgatgactcataatatagggtagtataaagcaatattattgtatcaacatgaatcacttgtaaaaggcatgatgctgtaagttaacatttaagccacccatttatcttcaaataatgatgataagtaaaatttaatgaaagtagaaaaaaaattaagaggtgaactgaaaaagaaatataaataccttttgggccagaaatggtataaaaacatggggactaggttattctctgctaacttctgctggggagtggtctaagataaacttaagtgccaaaaacatcttgcatggtagaggactggactcagctccacctcatagaaagtttaataaaaaataggtgcaactgctgtacagagctgaggcttatagaaagctgcagaaaaaagtagagaaagctgtacagcaggtattgtgggcatgtgtctatggtacagtgatttggttctgtgatgcctctaatcaccttggactggagccctggactttaagaaacttggttctgcagtgggagagagggataggagtattgttgattgaaggccacacacacctgatacaaagccatagggggagtgccccgaaagagaataaaattcactcaacgtaaatgagaaacaaaaaggtagaaactatgttaggaaagataatctattagtgataatttaaagacttacctgatggtacctgactttatcctaatgaaacacaaataatattataatcaggcctttaaaattaatatgtataaaataatatcctaaaaggagataaaataaaaaaatcaacggtgagtttaatataaaaaatagttgactgtaaatttacactataatgacaatctcaatagaaaaggtcagttttgggctggatagaggcataaattgcagaactaaagaaataaaaagtaaaaatatgatctgagtattcaaccagagcacaataaagagatacgaataaatgaaaagtttaatagagaagttcagaagcttctaagactccaatacacatgtaaggggagctcctaaagtagagagacagagattggcacaggaggagccttaaagcagttatggtggaaaattttccagaagaaaggaaagatgaaaggtcttcacctagacacagggttgtggtaatattgtgcaatactaaggataatgagaatcagaacttcaagataaagggaaaacaaattactggaaaaccaaatgacaattactctgaccttagatttctcatctgcatctactaagagttattctttagaaggaaggaaacaaatgtggaaagaaagataaaagaaacaatgtgtaaaaatatggttgtgaatataattaaatattgatcccagagtaattataacttattttgagttttaaaaataaagatgtaaaaaaaagttttataatattgacaaggacgtgttttggaagataaaaataataataaaaaactcttaaaagatgtaatattcataaacatttatacacatgacaacataaatttactcaaaatttgtaaggtttatttgtataaagtttattggattgatttaagaaatctatacttttctgagcctaacatagaacgaatgcatcattttcatgcacttgcagaacatttatcaaaactgaccatgtactaaaaaacagtgacttatagtccctgacttacaatgattcaacttaggattttttgactttaaaatggtgtaaaagtgatgcacatttagtagaaaacttacttcaaatactcattcacctactttatttttaactttcagtactgtatgcgataaattacatgaaatattcagtactttatcttataacaggctttgtggtagattattttgcctatctgtgggctaatgtaagtgtcctgagcatatgattttggataagtttcttataactaaactataaacacttaacgttttcatctatatttggtcagttttaaccactctattcaattggtttatcaaatatccaatataacctttgtttagtcataataacacagactataatcttatgagtcagttcctttgtatagaaaatgaacaatcatacctaaagtcgaagatttttaggattggagatataaatattaagttccccagagagtgccttgtaaggaaaaggcattcatcacaagaagttatcaccattgactctaatcttcacaataaattgctgaagtaatcattactcttttaattttcagtgttggtatttaaaaaggtgaagtactgtctaatatatatatgttttttttattgttgtttttaaggtttggcttaggtgtcaatttctctttcaggtgggtttaccttctcaaatactctgagagcaacgtttgtgaaaattaaccctgttccagacaggctacatagtaatatagtttattaaaaatatttaggacatgtgagtgctctattatccagggagctagttactggagagtctatgttttttttcatactggtgtctaggacataggaggtacctaaacaatacctaccaaattgaaaaggaaattgaatgaaagaatattctgatttcagctaacacagtatttttaacctgccagttgtttctctcaatgtctattttaataatatgaaaattatggaaaaaaatctttgagaattactaatacagtaataattttgataaataaaaatttgacattacatgaagtttttatcatttttaatacatttgaaacacagtactcacttttggtgttcctggtctaattgttatgaagaaaactatttgtcaagaagcccaagtatatttcttttcaaagaatgaatgcagtgattagtatgtactcagtatttcctttgacttgtcttacaaaaggaaacaaacaacaaagaaaattacatagaagcatctcctagaaggtatgtaatttcaggaaacttacttttggatgcacaaatagcaatttcttcattcaggcattcaaaaggtaacgagacattcatcccactaattaagtaactcaagaaactgaaacgagcaaaagaaaaactgatgtattatttttattaagatttatcttagacctacactgatgaaataacattcctttagaaattaccagaaattatttttatttgataatgaaatcaaggtaaacacttgcaagagtataatcctcttgtgaggtatgtagaatacaatcatactgttacaattcatccttcaactagtagagatgttctaaaatttccaagagtattttacttctcatgacttccctatggtatatatttgctattgtttggttaattagaacaaacagagtaattgaggaataattacagctatcaaacatttatgtttattttcattatatactcttagcaagaagggttaaaacaagcaagagttaccctcaaatttgaattggtaaatatacttttatttacaatgctttgtcttttttcatttatagaacactatataatgattagaaaattatactatttctgtctccagaaggtgaggagacttgggggaaaatcctgtggctcctctctgcattgcaatctttccattttaaatatcaatataatctctccctttcttcaaagtaatgtgaaaattatggagaaaatgctggtaaagtcaatttggagtggtgaaatacatgcactttctagatgaatgaaagatgagaaatcacaggatgaatacacaagaaaattaatattaaaaatgttcctcaagaatgtactatgtacccacaatattaaaaaatttaaaaagtaaaattaaaaaaatatataccatgtacttacaaagtaaaaatattaaaaagtaaaatttaaaaaaggatattcacttgcagataattcttcattatcactaaggtagaactgttttccttggtgacttttactactttgtttaagcatatcactgaaggccaggaattttgaaattcatcaaaatcttgttgagtgcctattaaaataatcttaaaatagtccaagtgatacaatatttgtagggaagggaacaccttaaaaagaatacaaatgcaatttataagacaagaaaaggaaaggaaatgtatacagagaaggaagaaataaaactgtctttgttagcaggtggcagaattgtctatgtagaaaattccaaagaatcaacagaaaaactcctggaactaatacacaattttggcaaaaaaggatataagattaataaacaaaagtcagccactttcctttacaatagcaataaatgattagaatttgaaattaaaagtataccatttacatttgcatccttaaaaacgaaatacttagatataaatctaatgaaataggtataatatgtatatgagaaaaactatgaaactgtgatgaaataaataaaaaaagctaaataaatagagacatattccgggtttccaaatagaagacttagtattttcaagatgtcaggtcttcccaattagatctatagattcagtacaatcccaaatcaaaatctcaggaaactattttatagatattgacaaactgattctaaagtttatatagagaggcaaaagattaaccaacataatatagaacaacaaagttggaggactcggactacctgattttaagacttactgtaaagctgcagtaatcaagacagtgtgatattgttaaaataatagacaatagatcactggaacagaatagagagcccagaaatagacacacgtaaatatagccaacttatctttgacaaaagagcaaaggcaatataatggagaagggatagtcctttcaacgaatgatatttataccaccctacttccatatgtaaaaaagtgaatctagaaacaaaccttacacccattaaaaattaattaaagatggatcataaacctcaatgtaaaatacaaaactacagaactctttgaagataacatgggagaccatgtagatgaccttcggttagacaatgactttttaggtacaaaatcaaaggcaagatttataaaataaattattgataagatagacttcatcaaatataaaaaattctgagctgggtgtggtggcatgtacctgtagtcctggctactcagaaggctgagggaggtttgcttgaatgcaggagtttgagaccagcctggggagcatagtgagactctcatctcaaaacaaacacagaaacaaaattaaaacttctactctgcaggaaactgtcttgaaagaaaatgaaaagacaagccacaggctgggagaaaatatttgcaaaagacatacttcataaagaactgttatgcaaaatgtccaaaagtctcttacaacccaacaatatgaaaacaacccatttaaaaaatgatacaaagaccttagcagatatctcaccaagaaagatatacagatggaaaataagcatctgaatagatgcctcatatgtatcatcagggaaatgcaacatgaaacaacaacgggataccactatactattagaatgcttagtctgctcagtttgctacaacaaaataccataaactggatggcttataaacaacaaaaattatttctcttggttctggatgctgggaattcccatggatgaaattggaaatcatcattctcagtaaactatcgcaagaacaaaaaaccaaacaccgcatattctcactcataggtgggaattgaacaatgagatcacatggacacaggaaggggaatatcacactctggggactgttgtggggtggggggaggggggagggatagcactgggagatatacctaatgctagatgacgagttagtgggtgcagcgcaccagcacggcacatgtatacgtatgtaactgacctgcacaatgtgcacatgtaccctaaaacttaaagtataataaaaaaaatatatgctcataagctgctttctggtcataggtaaaggctttttactgtgcctgtcttacatgtgacaggggcaaggtatttctcctggggttgtttttaagggaactaatctaattgaggagggctcctcatgacctaatcacctcctaagtcatgacctaatgactttttaaaaaccccacctttctaacatttgtggttagttttcaacatacgaattgaatgaaatgggggcgtagacacaaacattcagaggagaccaaacagccaaaatgcagaacactgatatcaccaaatgctgacaggattaggagaaataggaactttattcttccctggtggaaatgcaaaatggtacagccaatttggaagacagtttgacagtatcttgcaaaattaaacatactcttatcatatgatctggcaatttaccccaaagagttgaaaacttacgttaacatgcaaacctgcacatggatatttatagcagctttattcataatcaccaaaatttttgagatatccttcagtaagtggatgcataaataaactatggtacatacagatattgcaatattattcaggattaaaaagagaggagctatcaagccatggagagacacagagaaaacttaaatatatgttactaaatgaaagaagccaatctgaaaaggctgtatattgtatgatttcaactgtatggcattctagaaaaggcaaaactatggaggcactaaaaagaccagtgattgctggggagaaggtgagagagggatgcatatggagattaagaagatttttaggacagtgaaagaaactattgtgtatgatgctgtagtcctatgatgctattttcataataaatttgtgcaaacccattgaaggtgcaccagttgtaataaatgtactcaaatgtaccactatggagaggatgttgataatagggaggcagttctcttaatgcaccaactaccttagttctcgggtggcaggatagcatggtgggaaaccagatgatgtagttcagtgttttttaaatgcttcatgaacaattcttggtttgtaaagttaatttattaattataataaccagctatttttgttagtagagtggctagaatatatcaaaatctattttatcagaatgtatgaatttaatatattaaaatataacatattctaagtgggttaggaatgacaaattcatataattttttcagttatacatttcttattgaaaaattagagaaatatagtgaattttttagcgattactgtgaaaatgtaatcgttaaaaaacaaatttacaagaaaaaaaacccatcaaaaagtgggcgaaggatatgaacagacacttctcaaaagaagacatttatgcggccaaaaaacacatgaaaaaatgctcatcatcactggccatcagagaaatgcaaatcaaaaccacaatgagataccatctcacaccagttagaatggcgatcattaaaaagtcaggaaacaacaggtgctggagaagatgtggacaaataggaacacttttacactgttggtgggactgtaaactagttcaaccattgtggaagtcggtgtggcgattcctcagggatctagaactggaaataccatttgacccagccatcccattactgggtatatacccaaaggattataaatcatgctgctataaagacacatgcacacgtatgtttattgcggcactattcacaatagcaaagacttggaaccaacccaaatgtccaacaatgatagactggattaagaaaatgtggcacatatacaccatggaatactatgcagccataaaaaatgatgagttcatgtcctttgtagggacatggatgaagctgaaaaccatcattttcagcaaactatcgcaaggacaaaaaaaccaaacactgcatgttctcactcataggtgggaattgaacaatgagaacacatggacacaggaaggggaacaccacacaccggggactgttgttggttggggggagcggggagggatagcattaggagatatacctaatgctagatgacgagttaatgggtgcagcacaccaacatggcacatgtatacatatgtaacaaacctgcacgttgtgcacatgtaccttaaaacttaaagtataatttaaaaaaaaaaagagttcaggctttggagtcaagtagccttaagataaaatcttttgtatgtgaacctgaccacaggtttcttacctaggaaatggatctgataattgtacctccataaaggagggttgaagactaaatgatagagatttaacataaagcctggcacataggatatatttcaataaatattggccaccttattattgtggggaaatacatattaagtatacttttcattcatctttaaatacttcagtcactctcttctgatattaacaagtttatttcatttattacattgtttcggcagttgacccttcaacttaaaaattaaatcatagaatattagtcagttgatggacaactgacatttgctttaacgaaaaaaagaggggtctttctcaccgaaagagccaaattattttataatatttttgttacattatgaaacaatagggaactatattctaagaaaaaatctcttaggaatttgatactgtaagtaactggacctaataatatcttttatgtataatttgtttgtaattttatgttgcacttctctgaagactgatgtagtttaataaaaggaatgaaaaatattatttttgaaaaatattcttcgtatttatggacattttaaattttgtaatttgttttaactaacttttgtaaacttttatttttaaatttaacaaaattaagttaaccctcttttttttaacttacacaatctattcattggcagtttaaagtgttacaatattagttattttaatttacatttttcatataatgccaactctagatttataattgatttcaattttcatagtttcataatatacttaaatacaaatcactaccccccattcacccacaaaatatttttggagctatttatttggctttttatccatttgccctcattttgtcataatcaggctacattcatggaagtatattgtgtatatatgaaataatccattacttgtatttcagttaaaaaagagttagttgctgatgttttaaagggatagagggccacttatgccttcagatctctattaagttggaaagtgtaacttatgtatttcagaatttagggttgatggtagaagaatattagtggctaaaaaaacattgaatgagccctcatgtattgccgaggtgcaatagtgtgctgaagccagccaggaccagctctagtgctgattaaatttttaggaattttgtaaacaggttgtgaaacacagtaattttgaaaaattaaagtatatgaacatgtagtcataaaaatcatattaaaaataactataacaaatactacaaactcactgcctctaaattatttatttcccattaactatgctcatgagattatttatatctattgcattatatgtttgaaattttaatttttgcagtgatggatgtgttcgatgtattatccactagccacatgtagttattgagcacttgaaatataattagtgctactgaggtctttgcatttttaattttatttaattttaattttaatttgaacttaatcaaatgtggctagtggattccgtcttggacactatgagtttagatacattctgtctcatggaatttgaacactaggtgaaatgagaagtagataacatttgctatatgggcaggcagtttcctaaagcactttccacatataattagctcattaaatcctcaaagcatctctatgaaatatattttattaatcccaccttattaaggagactgaggcatagaaatgttaaaggacttgttcaattctatacatcatgagaatgatggaagtcaagactcaaccccaagagtctcgtttcaatgccatacttctaaaaatataccatctgttgtgctgaaattcacaaaaatgtggttcaattatttacttccttaaaaattgcatcaaggttaatccaaactcctgttaaactcggggaaaacctagtgcaataaaaagttgtaaagaaaaaattccagaacagagcaggcaaagggataccaattgatagattagtgtattgagccaagcaatgtaatgagtatgtattgaacaactcttaagctgcagtgcacggggttgagcaaatcgggctaacaatttacattctagtatgtgcacatatgctatgtgtactgaggagtgtgcttgctttcatttcttcaaacactttttaagagtctttaactctgtgttgggtacttaatagggattctgtaaacattttttaaaataattcaatgtttgcatctcataatttttttaaaagaaggcttaaatttttattcaaaaatattaaaatattttaggtgaaaatacatacatattgtgtattatttggtaattgctactttattatttgcatgccattagctagaatttgttcagatatgctaggcgtttcagaactaacctatttcttgcttatgagtgaatgctgagcacaaattatattccatttggttatgacactgtaacttcatattataatgaatgctgtagccttagtacatttaaatctgcttccattgtaaaagatgtcagcaataaatgatacttttaaatacatcataaatgtcttcatttaagatttgttaaaacacaatgttatttgtaaatgttagcagattttaacatgggaaagttaaatatttaattattagttcacaaagctaaaattattcaactaaatatgaaagaaattagcatttatttaatccctaaataaaattagctatatctctgttccctgatcagagatccttgatcacgttaaacatatgttttaagtatctctttatgaaaagtatgtgaaatctttctttggggaaatataaaaaatatattttaactatattttaattaatgatctaataaaatatatatttatgaaaagtatgtgaaacctttctttggggaaatataaaatatattttaactacattttaattaatgatcatataaaactaccagaatttagttccttgttcacattgcttagaaaggaataaaagataacagtatatgttgattcaaaaacaatatttaagaaaatctgtactgtttggatagcacagggaagagcaggaacacatattaataatttgtaaattatacaaattgtagctgggaataagaaattattttattaccaatttaaactcattagttaacatatattcccccttatgtataaaaacactgaatattaaaaggtgaattcaaagatgttgtcttcccttaaatattttatggtctaagagaggaaacagataagtaaaccagtaaaagtgacaaagtattagaatgaaaatgacaaaatattatgagaccatttatgaggacctttcatctcatgcttagaaattgaccctataatacttgttgataataccctcttcaattttttaaaataagattgtttggatgttccttatgtgttttgactttatttacaatagtttgtggtatatgtgggatgaggttaagaaaatgtaaagtcctgtcacctttattcctcattcttaagaaaacttacatttatatctattgatctctgtctgggtttccaggagagaaagttactgctttgacctattaaatgcaagcaactgtgtgagccaatccattggatagcataaataacttacctataatatggatttattcattggccacttctattggtagtcaagttttcatgagagtagaataatgagattatagtgatttatttattttacttttagttctatcaattttgctttatatatttaaaattgtattttaaaatcttgttgaaagattgaccatttccttgctatgaaatgttctttaagtttagtaatgcatcttgccttaaagtgtaatatttctaatattggtatatatatatttcatatatatatataatatatatatgtaccagctttcttttggttagtgtttgctttgtataactttttctagtctttaactttacacttatctatctgtgctcttatatttaaggcatttatcttccataacttttgtcttttaattggaattttagtccatttacatttaatataatttctcatgttgacatttatatttaccatcttaccatttgtttctttgtttcctaccctctaccacctatttataataattttaattaatacattttaataatgtgtttttaaaatcccactccctccttccacattagctagttattttttttgctaaatatgttttactaaatgtacttagtaaatttaattttttatttttaacaaattccagcttttaatgaagtttacattcttcttacatatttttgaacatatcaatcatagttattctaaaatttatttttgataaccacacttacgagattatgtatgtatctctttcaatttttttaggtttatttttcttgcaggcttggacttttaaaaataaaaacccaggcattttataaaaaatttgtagaaactgtggttgacttattattcacagaaagtgcattctatcgtttggtacatagataacagtgaggactgatcactgtcatttaaatccagggctgagttgactcaaggctaggttggctatttacccctcatttgccctacttgtagagtgtagccctccagaagcttcagccgtacactgaggtgtgtactagggctctttcttatttagtcactccagtttttgtttttcctggaccatagggttttctgtttagatctttaggtttttgtcatatgcactttaagaattaatctcactcttctgtactttattttgctctaggttaatggcctcctacatttccaaaactctgtgtctctctggtttcaaaagactgccaacatctcttttctgagctgtggttctcttcaagatgcttagccttcctccctttggtaagaagtcgcaaatccctcaggggaaaagtgacttctggtcacttaactttgttcttactttcctctgagatgttagcccttccaagatgcctgcgtcagtagttcttgaatgtttcaactatttttttaaatcattattctcccaaagttaatctgtcataatcaaaagcagaattcaagaaattatttattaaatgtctaccgtgtgccatcgcaatgctaactcctataatgcaagggtaatgtgtttacatgtgacatgttttctgattcagggaactaacattcattctactgactgacatcataacacataccacagatggttatgttagagacatacagattatgctgtaggagcttagaggagaggcacttaatgtaccctctaggtgggagtagggaatgtgccccatgagtgtttcctagaggaggcatgactctagaaaggaaagactgaaagttagccataactcctcatctacttgacacaataaaagttgtaagtataccatattaatactgaaaatgtactgctcattgctatttaaaacaagaattcgtttgaaacattaaaaatatgtttgaggatgtaagctagtttcaaaattttaaccatgacaattgatttccccgtaggtattcaaagcaatgagtatcccacagatcagaaatccttcgctgcctcccccagaaaaaatgtctgaagcctattctgcaaagattgctctttttggtgctgggcctgcaagtataagttgtgcttcctttttggctcgattggggtactctgacatcactatatttgaaaaacaagaatatgttggtggtttaaggtaatgcctacatttatttcatgtttatagtgtcagaaatgatggagcaaaacaattatgaatattgttggttcataatcatataggaacttcaggctcacagatggtattttaaatgttctttttccaaatgttcaagttttgattacattattcactttaaaatttgcagttggcttgaagcaatatttatttaaaaaattttctctctagttctgtgaatttaagagaaatctctgcaaattattttttgattataagaaccaatcatatgaaaaatgattttagccctgtgaatatttcttttaatggagatataactgaaaatcctggatattagtgatgtggaaaacctagatccatggaatattggactattcattgtgttgtctacatagatatgttgtcttacatattttcagtttaaaatttcttaagtcttacttttgattaaaattttgtcagcatgtactagaaatgtatttaaatatacatttttaaaatcacatgatcatattattcccatgaaaatttatacatggaaatgggaatatatattgaaaataaacagaactctatacgggacacatatttcattatcataaagaaataaaatttattacaattagggaatagatattgcttaaaacattttatacaaaataaagaatttggatggtaactgaataatattactcaattgatttttattttctctatgtatattatcaaaaaaatcatggattacaaaatgtatccatttggaatatctgtttctatgcttaacatttaaatttgttgtggctactgccctatgtgtaacaaataaattaatcatacccaataatcacagaggataaatttaatcaaatttgttactaaaatttgtgaagtttcttatgttttttggcaccagtgaatatatgttaataaatgtataaatttcaatattactcaaacaacaatatgctaagcccaagataatataaaattatcaattatcaattatttgtatcattgatataaatatgttgatatatttattaacataaatattgatgtataagctatcattaatataatcttatttgactgaatcatcaagcaaaaatatcacattttaggaagaccctttagtgtgggcatgaaacataaataacctgattgttaagaaataattattcttctgtactgatgttccactactatgaattccaagagattacatgtattttatgaatttatttttctggaaagtaaaatgtcctatatattatttctctggaaagatttagaatatcattttaatggtatttaccacagctttattaattagaaaaaacataatctattaacaatatatgtataagcattgtatgttgttttcagttatacacatcagtgaatatctgagtcaatttttaaaatatgaacttaattgtgtaccctggtaaactaggaaaaatctgtttgccacttgattgcattttcacaaaaggcctaaaatggaaccaaccctatttgtaacttactatgtattgccaattttggtagattactgttgttagcctatctcttttttaactcaaatgcaggataggcatttgtaattcatataaattagtactaaacttgttttttttaaatttatttgctgaacatttttttagtgagacagagttctctggatccagaccaaacatggtggtttttcttttaaagttgttaaattctttcttttgcctttgaatcttttcagtatgtagagacaatatgaaatatttaatcaatctcctttgtactgtcccatggtacaggcattctgtgtcactgttacaggattataaaaactgatgctggaatttagccggaattatagccacaaaactttcctgttactttattttctacttacggctgcctctcattctcttgtatcttgaaagtggctaaaaaagattaaattagctttgtatttgaaatcaattgcttaaagaggtaatgtcaagttttatctttccttctcctttgcatccaaacagattcttttatctctggtgaattagtatcacaaccactttttaagaaatcactggagtcagtgaaaaatatctaggatttaatctccattgcattgaacacatcaattatttttaatgttgcaacaaatttataaaataatcagtagttttgctttcctctaacagtggcttctgtttttaggacacgagtttaacagggttaaaagggcttgatattataacaaagataaacaaaatagtgctaatagattttcaagaatgtttgtacatatatacattctgatttttctcttataaattaatatataaggattatgatgttattgttaggatagtgaggccaatgctgccctttgctttacctctttcaaattttatattgttttcattaggcctattgtttttcttgttgattgacaataaagagaaatgaggtctaggtgaactagttatagcaataggaaatattttgagaatgtgtgatgtattacaaatttaagtctattatctctatagtaataaactgaagcatacctctgtcagagtatgagaattgtgctttaaaaagaacggaaagttgttatagatatatttcatcacatgaaagaaacatgaaaatagaagaaagatttttttcatgttgtctgactttccactgactatactaaaggacttacgattacaagaaatttttttttttcaaagccttagattgttacaggagcacagatagaagaaaagtttgttttcctaagcacaacaaacttggaaaataatcattcctattaaattctgtcttctgtccttttatctcctttctcaccatgcagtcttcagaataatctcatttactctcatggtttcaattatcacctacatgcaaatttcttaaaaatccatatctgccctgacctctttctctattctaagcaacagatttatacattcaaatcctagacatctccgtataaacttcatatcaatgatcaatgttgcttctcttcctgagtttaccatctcagaggatggcatcaccaaaatggggattatctgggctactctttaatatcctggcaattccactttatgaacactctaaaaaaatgtcctctgatatcctttacctctcagtttccttttttttttctttttttcttttcttttttctttcttttttttttgaaagagtctggctctgtcaccaagtctggagtgcagtggcgagatcttggctcactgcaacctccacctccgggattcaagtgattcttctgcctccgcctcccaagtagctgggactacaggcatgcaccaccatgcctggctaatttttgtatttttaataaagatgggatttcatcatgttggccaggctggttttgaactcctgacctcaagcgatctacccaccttggcctcccaaagggctgggattacaggcgtgagccactgcgcccggccacctctcactttctttaccactgcagtagcttccaagcagttatcttggcttcctgatttgttttttcaaattcattcttcctttagtttcaaatctgattctatcactcttccacttgaaatctttcaacaactcctcctaacctcagagataaaggatctgtcctggcataaaaacccttccacgacctgatacctacctgtattttcccctttctccttccctcccttccttccttcagtatatatatatatcgatcacttaactatgtgctggtcattatttctggctctatttagagcataaaagtaaacaaggcaaagtgccttctcatgggccctatattttagtcgtggggagacagacaataaacgaacaataaaccaaatatagaatatgttaagtgaggataaatgcaaggaggaagtttttaaaaaatgatggattagtggtatacctagcatactagatactcagaatagatttttttaacatgctatcctctggtctatacaataagattgaataagaatcacacaataaccagtaataattattttttaatttattcctgtaaaacaaaaaatgattaaaacattattttaatgtgaaggatatagctattttcaattttaaacacaaaaattccatgtgatcatacaaaatgacagaattgaagtaattaatattgcttcatgtgctatcattttatctattccaaatcaacttttcacatattggaatctgtagtatcacaagagtggaggcatatgtcgcctatggggaattggaatgaggaatgcctgtagctgaatcagcagttgctgatggcctctatttaactgtagttctgcaagttaactttcctgtagaacacaatgtttattaaagagttggtaataaaaatgggatcattgaaagcttacatatatattactaaaactcaatagcaactatggctattgtttagaatttagactcaccagagaattttttttattttggcagaggacattgtttaggatattagtgatattatttagaattgctagctcatgaaaataagacaaaacagactcactttagtaagttttataatggtttttaaattgtctaaaaagaacacacctttttactttactgcctgcatctgggcttggtgtggggctggaaagggaatagtgtgtgatgatggagtttaggtcctgagcaactcataaaatggggttgtctgaggaccagtgttgggatgcaagaaccaaagcttactgttaggcatgataaatatgagttacccattagacacccaagtgaacataaaagtctggaatttaagaagaaaaatgtggaagccatcatacactgatgatattttaaagtcctaagacatttcccctacccacttatctcatcccacaataagccttccctcctttgaaacacttgttcacatttagtattttacatttgtcatgttgttctgctgatgtatgtgtgtatgtgtttcgtctatttgctgacttcatccattagtgaatataaaaacgtcacatttttcacaatcagtaatttccacctaccccctacctacttgactgtaaccaaatctaacatttctcagtatttcatatttctctgatttgcttcaggagatgctgggaaatggattctctcacacttattcgtttaacactgtgctaagtgttggtgacaatggttccagagcagcatggggttttaagcagagttgctgaactccagcagcctggcttccattttctctggtgcctgcatctgcattcaaagttatactgccaagggtggtggctgccccttcctcctttctcaggtgtcttcctgctaggttaggtgttccttcctttatttttttctgaccaacagaaaagttgtccctgctttttataacatgcctttcagagtttttttcttaagtcagaaccattgacttgcactcacaccattttttttccttttattccatgtgcttctacttaacatcccataaaaatccaagagtaggcctgactcattggaaggttctcggcttcacaatgtgtctggatgtatttaagattctcatcttgttgtagttggtttatttggctggaattctttgttcatagtccattgcttttgctttcctgttcaaccttttgaggatctgcatcagtgcccagttttagtccatatttaatctccctctcatgcagccccatgtctatcaagtctgtgtgtctgtttgtgtccacatacagtccatagttgttaagaatctttctacttagactttgaagggaaaaccttcttggtgcccagagcattctggcacattcttgttaccttgaggtaatgtggctggagttcacaagttggcttaagagatttttatccctgccctatgcctgaattcattcttaaacatcatcttgtattcctaactagagggaagctcctttagtgtacagctttgattttatggtgtttgataccttgcattttcttttttggtttttttttttttttttttttttttttgagacggagtctggctctgtcgcccaggctggagtgcagtggcatgatcttggctcactgcaagctccacctcccgggttcacactattctcctgcctcagccttccaagtagctgggactacaggtgcccgccactatgcctggctaatttttttgtatttttagtagagacggggtttcaccgtgttagccaggatggtcttgatctcctgacctcgtgatccgctggcctcggcctcccaaagtgctggaattacaggcgtgagccaccgcggataccttgcattttctatagcattgagcatgatgtcttgctgattgatatataaaaattaattgcataatcaagttcttaagtcatcaaacaatgaaaaggctgtactttgggagatttttcaattgatgatccagaagattcatcttcaacaattatttattttccaaattaatctctataatatataaaatatgattgctattttatgtatatatacacattaaagatataatggatatacttctctcattgtgcgtaccacattctaaatgtaattatcttttgtgtatccttccctgatcagaaaaagaacttattaacagtgagaatttggtgaaattcaccatcaaatcattgcagcttacacttagctggcacttcgtaaacactgtgcctggcactattcacttttaatgagtaggtgaatgaatgattcagcaaatgaatgaatgaatggattgctgtgtattcatggacatacatagcttttttaattgttaacaaaacactggaaagtgtttttagcttacttttaatactctattatactactcaaataatagtgccataggcctcattttttttttaaatgcaggcaataggcattaatatacaatagaattgttttttaatgactgaacttttggaatactcattgctttcacagaagactaaaatgttctatagatcacatggaactgattttgtaatattctaaacagtatggtaatacagttacacatttgcatatcaacaagctagaagtacatttatagactatgtatatgaatgttagtgtatatatatatgtgtatacatatattaaaatctatatctccatctagctttattaatagattttaagattttttatcttaggaatttatagaattattattaaataaatcaaccaaatactttattgaacttaaaagtattgaaattgcttttggccagttttatatttatcattttctgttgctgtaatttagttatttttatatcagtttctactgtatcttcactccacgtaacatgtttatatcaataagaatgtagatgtcctcatgcatatcttgtgtgatatataaatatccttggaagagatatttattttctactaatccataaagacatgttacctttttttaagattggtcaaagattggtcatttttctactgatgcctgtttttctttctcctttcttttcagtacttctgaaattcctcagttccggctgccgtatgatgtagtgaattttgagattgagctaatgaaggaccttggtgtaaaggtaaatgaaaaaaacacctatctgtgtactgctcaaaaagaaaggagtaagctctacactaaagattaacagcaaatgtcatgcattttaggaaagaacaattaaaagctacatcaggcagaagcagaaagatgcttccccttgcttagggcatttgtctgtctactgtctgaatgccactagcctggaaaagggcaatcaatagttctcatctggcatgcctgcatgtgattaattgtctgtaagaaacaaattcctaaattgctttaggggttcagtgcagctaatagaaggatttggtttctttaatcatgttttttcatgcaagttgtgtgcactctgaaacattagtatttcacaatttggaacataatttcttatggagatttattttatttgttatattcatcatgtcagtagtgtgaatgtgataatcctttctcaacacaagcagtaaatcagtgggatagaaagcaacagcttcgtattttttattattttgttaaataaatattgtgttattcttttcgagatggttgaaaatttgacacatcgttattttcagcatatagctttaaatattcctcttcttttctgttaagagcattatattctagctcttcacttgaacatattgctatttttgtttcaaaaatgttaatttttcataatagatataacacaatagattaataatgtactgtgatttacataatacatgctgtaagtatatgcagaagatactttgaaaagtgattaacaaactactcataccttttgcatttaccagtaaaacttaaaatgaatcaataaaagagaaaacactcaaaaaaatattttgtggtttatatttataattacgttttaattgacagtggccgggtgatgaaacattcacacataatgactaaacaagatgtctgggaataaaaacacatagtatagatttgggcaactttataaaacttaatgttcaaaattacagtgttcaaaatagataatttagaggtgattattttacagaagtacattctgaaaagtttttaaatgtctttcattttgaatacaagttcttctctaaatctcatcaaatatggaaatgattattgaaatttccaactattagattcggtattctgaattgaagatgaatgttcccaacacaaagacatgggaaatgtttgaggtgatgaatatcctaattatcctgatttgatcattacactttctatgcatgtatcaccccataaatatgtaaaattattatatattaataaaaaatgaaaaaagaaattaggctttatttctccatttatcttatataaaattgcaaaattgcattcagttttcacaggaccagatatattgcataaattagagcatacccattactcttatttgaaaactcatcaaggtgcagtagtaggcaatatactgagtgccaagaaatatatcttagctatagtcatgccactttttaattttgtcagatatctttggcaaagtctattaatatctagaacgttgttcaaaatctgctcaaataaaaagtatgctactaatatttgaacaaaatataaaaatatttgtttacatatgcaaagaatatctcagaaagatataagaatctgatagaacagattgcctttgagaaggtgtgggacaattttttcaacattttgtacatttgaattttaaactgtgaatctgttacattattgaggaaaaaaaatggaacctaaattaaagagaaagctaacagtactgtcttgtccatctctcaagctgttttaagatgtgaaggaaatgatgttttcaaatttgctttgtaaacaataaactgtatatacaattctgaggaaagatagcagtgagattccttttcactttgaggatttgtatcctttgatgagatactcttgcagcttttatgatttacgaactttagccataagtgggtacattttgacaaagtggtctgtgctcattacctccttttgaaaagtcatcacggaggttctttttataatttgccttctgtttgtctctctcaactaatatatattttaaagtcaaaaataatttcctggcaatgaaatgaactatttttgtgggttcatactgtttgactcccgtgtagcatatgatgtaagagttctcttatatatgtatgtatgtattttgactttcatgacctagcattatcttgtttattcttctactttctcttttacttcccaaagaggtttatttcatttactcaacaaataattgttcagaacttatttttgccaagtagtatgccaggactagaaccatgtagagccatccttcttttgaactccagtcctgtatacttagtagtttaataagcgtattatcatccaaataacataacctgattatatccagaacccagttcagtttctttatcttcactcccaactatctttttttagctgcatttcctattgaatattttaatttcaatttatcttattagccaatcagtccttgttagttctaagattaattttttaaagtcaaatatcatgttacaagagaataaagataattttgtttgttatttgtacattattcatatttttcttccacaatttcaatatctagtatgttaaaaaaaaaaagaggtataatacatggaattctttttcttgtctctgaaatgggatttttaatcatattgaataaatatttttctagtcttacattaatacattttattaatttaaaaagttaatcaaaagtgtgttaaatttttcaattcccctttgtaaatacttacgttgagtttatatgttgaattatactaatcattgaatttctaaaatttatcaattttggcatcatgtttatttctgtacatgtaattcagattcaattggttagtatttttaaaatttttcttgtgcattcatttatttatgtaatggatattaaaaccagaaatatcgcagggaacagtcaaataatgttgttaccattacaagttttaaatgtgcaaagactttttgttttgttttgctttatttttatttgttgttttgtgaatttttgataatagagttatattagccttataaaattaaacttctaagcattttattattttctcattggtaagaatattatcttgagacatcttttttactaaatttggaagttgtcatcttctccaaaccctcttatgaaatagaactatgaccatttttcttcatatcgtctataagttttttccactgattttattctcgtatcaattttgccaatatatttctagaaaaatttctgcttcattgaggtttttgaatttattagcaaaaatttaagtctactatttcagtatacaataaaaatatgtcatctgtgcctgtgattatatttgctcttgcatctctaaatttcctttgtgttttcctatccagttaatattttctttaaaataaacagttatcaaagttttgttttcttattcattaattgctgactatatatttattaatgctttcccctgctattcttatttgttagtctcttttttaaatttagttttattttattttattttacgttccaggatgcacgtgcaggatgcgtagatttgttacataggtaaacgtgtgacatggtggtttgctgcacctatcaacacatcacctaggtattaagcctcacatgcattagctaattatcctgattctctccctgtccctgccccactcaactggccccagtgtgtgttgttcccctccctgtgtccatgtattctcattgttcagcttccacttgtaagtgagatcatgcagtgtttggttttccatttctgtgttagttttctgaggataatggcttccagctctgtccatgtccctgcaaaggacatgatctaatttttttaatggctgcatagtagtccatggtgtatatgtaccacattttctttatccactatattattgatgggcattttggttgattccatgtctttgctattgtgaataatgctgcagtgaacatacacctgcatgtatctttataacagaatgatctatattcctttgggcatatacccaaaaatgggattgttgggtcaaatagtatttctggttctatgtctttgaggaattgccacactgttttccacatggttgaactaatttatattccactaacagtgtaaaagcatttatatttctccacagcctcgccagcatctgttgtttcttgactttttaataatcaccattctgactggtgtgaaatggtatctcattgtgggtttgatttgcatttctccaatgattgaatgattttgagctttttttcatgtttgtttgttggccacataaatgtctcattttgagaaatgtctgttcatgtcctttacgtaagttttttgtttgtttgtttgtttgtttgagatggaggatggagtctagctctgttacccaggctggagtgcagtggcactatcttggctcacttcaacctctacctcctgggttcaagctgttttcctgcccgagtgtcccaagtagctgggattataggtggctgccaccacacgtggctaatttttttatttgtgttacagatgggattttaccatgttggccaggctggttttgaactcctgatctcaagtgacccgcttgccttagcctcccaaattgctgggattacagacatgagccaccgtgcctggcctcctttgtccactttttaatggggttggtttttttcttgtaaatttgtttaagttccttgtagattctggacattagacctttgtcagatggatagattccaaaaattttctcccattctgtaggttgcctcttcactctgatgatagtttcttttgctgtgcagaagctcttttgtttaattaaatctcatctgtcaatttttgcttttgtgcaggtgcttttgatgttttcatgatgaaatctttgcccgtgcctatgtcctgaatggtatttcctagattttcttctagagttttatagttttgggttttatatgtaagtcttttttttttttttttttttttttttttgagacagagtctcgctctgtcgcccaggctggagtgcagtggcgcgatctcggctcactgcaagctccgcctcccaggttcacgccattctcctgcctcagcctcccgagtagctgggactacaggctcccgctaccacgcccggctaatttttttgtatttttagtagagacggggtttcaccgtgttagccaggatggtctcgatctcctgacctcgtgatccgcccgcctcggcctcccaaagtgctgggattacaggcgtgagccaccgcgcccggcctatatgtaagtctttaatccatcttgagttaatttttgtataaggtgtaaggaaggggtctagtttcaattttctgcatatggctagccagctttcccagcaccatttattaaatagggaatcctttccccattgcttgtttttgtcaggtttgtcaaagaccagatggttgtattgtgtggtcttatttctgagatctctgttctgttccattggtctatgtgtttatttttttccagtaccatgctgttttggttactgcagccttatagtatagtttgaagtcgggtagcatgatgcctccagttttgttcttttggcttaggattgtcttggctatatgggctcttttttggttccatatgaattttaaagtagttttttctaactctgtgaggaatgtcaatggtagtttaatgggaatagcattgaatgtataaattgcttcgggcaggatgcctattgtcatattaattattcttattcatgagcatggagtatttttccttttgtttgtgccctctctgatttctttgagcagtgatttgtagttcttcttgaagaggtttttcactttccttgttagttgtatttctaggtattttattctctttgtagcagttgtgaatgggagttcattcatgatttggttctctgcttattgttggtgtataggaatgctagtggtttttgcacgctgactttgtatcctgagactttgcagaagttgcttatcaacttaacctattgggctgatcaatggggctttctagatatgggatcatgtcatctgcaaacaggcagttcgacttcctcttttcctatttgaatactctttatttctgtcttttgcctgattgccctggccagagcttccaatactgtgttgaaatggagtggtgagagaggatatccttgtcttatgccagttttcaaggggaatgcttccagcttttgcccatttggtatgatattggctgtgggtttattgtaaatggcttttattattttgaggtatgttcatcaatacctagtttattgagaattttttaacaggaaaggatattgaattttatcaaaggacttttctgcatctattgagataatcatgtgtttttttctttatttctctttatgtgatgagttacatttattaatttgcatatgttgaaccagccttgcacctagggatgaagccaacttgattgtgatggataagctttttatatgctgctgaatttcatttgccagcattttattgaggatttttgcatcaatgttcatcagggatattggcctgaagttttctctttttgttgtatctctgccaggttttggtatcaggatgatgctggcctgataaaatgagttagggagaagtcccttgttttcaattgtttgaaatagtttcagaagaaatggtaccagcttctatttgtaattctggtagaattcagctgtaaatccatctggccctgagctttttttggttggtaggctatttattactgcttcaatttcagaacttgttattggtctattcagggattcaacttcttccttgttcagccttgggagggtgtatgtgtccaggaatttatccatttcttctagactttctagtttatttgcatagaaatgtttataatattcttcgatgcttgtttgtatttctgtgggttcagtggtgatatcccctttatcattttttattgtttctatttgattcttctcttttttcttcattagtctacctattggtgtgtgtgtatatatatatatatttttttttcaaaaaaccagctcccggattcattcatttttttgaaggatttttcgtgtctctatctccttcagttccgctcttggagttatatggcacttactctcaaatcgatcacataattggaagtaaaacactcctcagcaaatgcaaaacaactgaaataataactaacagtctcttaggccacagcacaatcaaattagaactcaagattaagaaactcactcagaaccacgcaattggaaattgaacaacttgctcctgtatgactcctgggtaaacaatgaaattaaggcagaactcaggaagttctttgaaaccagtgagaacaaagagacaatgtaccagaatctctgggatgctgctaaagcagtgttaagagggaaatttacagcgctaaatgccacttcagaaagctagaaaggtctcacattgacaccctaccataacaactaaaagaactagacaagcaagagaaaaatatccacaaagctagcagaagacaagaaataagcaagatcagagtggaacttatttgttatttgctgtaaaatcttgagttgtaaacttacttcattttcattttatagattgaataatgaaaacatttaaagttattagtttcagaaaaatctttgtcagcatccatgtgttttcattattttattatttttatttttcttcagaaagtaggtttttttcccccgtgtagacaacagttatgtaggatagtattttcatttgcttctgtattcttgtgatataattcattattttttcactttattagccatatttgcattttttaaatttatcaagcatactctcaattgattttacaccaaaggatcatttatagtgtaataaaattgggtattccctttaggagaaatggcttcttagctgatgtttatttatacctttttttgtaatgcaactcagaatttaaatagaaatacatatttttgtttcatggtctttatatcctaatttttcaaagttaaaagtataaaatatgaatgaagatattgcatttttgcatatttaaaatatgtatatttgtcatttcccaaagtattctgatagaattctaattgattaccttaatttgtaatttctatacatttcttctgcttcgtagttttagatgaaatatctaatagaggtattacctttttcttaataacctcttataacatcttgttttcactatggttatttgaaccaataatatctgtgattatgagatagtattagaaaataaatataaaatcatattatttctctcccacaaggaaacatgtacactaatagctaataaataattttcatttctaaagatagctaaatactttcaaaatttcttcattttattttctatcttagagcatctggaaatatttggtctatttaaccaaattttctattagacaactgtgaagagtatgtatgtttttatttgatttttaaaaataatgggcatcacctattttatttgaagatttatactccacaaaaaagttgtcagcctttatcctgcataataaatgttactatgtatatgaatacatattatagtatataaagaaagttttcatcaaatccctaagagactattagatggaactttggctcagggtatatgacattcagaactgctggaataaagtagtgactattacactgaacttgaaatagattgaatttgtattccgaatttaggtaggaaatatctaataatatgttactaaagtcattagaggaaggtagaatgtatatctaagaaaatcaagatggaaatattacatatgtaaaagtacaaggaataaagaaacaaaaacaccaaacaaaatgcccgtaatatgatttttctagcatcatatatatttaacaaataacattgagatttcatagcttatcagccaacatgatgttcctgatagctgtagttgtcttgcaattccagttttagttaacacacatttcatttcaatttcccaaagcataatgtaagcaaagctttacttttgttgtcaaggaatctttcttctaattctttctaagaatagattatttcttgcatggcaaatatttggggcctcaggcttttaggaaagggaaatttgaataggttcccattcacaaaaaggaaggaagccttgtgcctgtcactgcttggaatgttcttgttatggctttgtcctcatttctaccagggatctgctgcccagtgatgaccatcctccatctttcccacaatgtctgttcatggtaaagtcaagtcttgctggtctccatcccagtagattcacaccaagatcaagatactcatctttgcagctttccatacatgaaaggaaaactcaactgttttctatccccatttgcacactattgtgtattagagtagaatcagactgtataaatacagaatgagcatctttcttatatattacaaaatcaaagacattttcactctgctgtggtggaagaattgggatgtctttattcctctttgataaatcacaaaaagctactattaaactaaactattgtgccttctcccacaaatacccacctcaaaaaggatgggaggtcttcttgaatcttcctgcagaggcactgaataaagtaaacctaagattaagtattttgagaatcacctccaccaattaattcattggcatggcattccagtgctcaactttgaaaatggcatacttactcagtttgctaatattctattagaatgtttggacctggtgttttcttttatgtctaacctttattatatattggtatgaagggtatttgattcataaaacaaacagcgaaattatttttctttttcaataaaatatgtattatttaaaagttagaataaattaaagttctaaagcctcactattagatgattttaatagcatcgaattctactaattctaatagtaatactattacttactataaaatgctttgaataatacatatttaattaatgttccagtttaatgttttttgatacattccagagttctgaatattcgttattaatctcaccttggttgtccccttattataaactttctgacagttaccatatctgccaatataaaaacagaattactattttaggaagacaaaacattgccctctatgatccagttccagtcatattctcctctccaacttcttgctccattgcttgctttgcactttatattcttgaaacacaacctttttagtaggtcttcacgtataatatgctgttctttgtccttgaggatggtgccagctctgccctctaacctcaagaggcacaagagcacagcaattatgcatgttggctctgaaattagactatgtatttgactgcaataaaggttatgtaagctctcttgtcctttagtatcattatctgtaaaatgaaaatactgataacacttcatggggctgctgtggggattaaatgagtcagtatatgcagtacttagaagagagctttacacttaggtgcactattcagtgtagctgtaattaccagttcatgggtatacattgctcttcttctatgactcagcttaagggctttgtttttaggaacattttgccttcagaacacaaagaaacctaccaggcattgtgcttccttctatatggcaggaaatgtgagatgcagctctatttgtcttttactttcaaggggacttactggcacatacttgataactggatctctaaacttcactcaagaggccagtccctgattatagagttcatcttccacccactggagtgcagatatcttaacagtttccagcatattcaccacctctttttcatgctgtctgatctgcctgatgtcgtcaaggtaatgaatcactgtgacgttctgtgggatgtccagatcgcttcagattacatatattattactgaaaagagttgacatatccctaaggcaaaactgtaaatgaatattcttatctatactctgtgactctgaactatttctgatctccttctgtaattggagtggaaggagtatgcatttgccaaatcaatggccacatgcagtctatgtgtggccttataaaacttctctagcaataataccacatctgtaacagaaactgcaatcaggactactctttagttaagcctgcagacatttatagtcatcctccagaaattctctggtgttggcaggggacaggctggtggattaaatggggatatgacagggaccactaacatctctccccatcccattgcacccaggataggatattatctttgatttagtctcttggctggattttcagatattttcatgtggccttcccaactatgatagcttttatagctcttacttcacagaccagagacccaatgtagggattacttcaattgacaaatgtaacaatttcaattatgctcttagagactaggagaacgatcactaactgagttgtggtttcagtgggcccactgtgaactagacttcagtcaggctccattttttacctcaccctgtaagtacccactcttatgtttccaagtatcagtattactgaagaaccagtgcttaatagtccttgaaatgtctgatcattcccctttttccagggcttagttgcttggataaatgaccatagtttcctttgggaaaggactaggggaatcacagtacttacttgtagggatgtttcagggtctttcttcctagggaccctgacacctccctggtcagcaggttccagaagtgaaaattatctcatgtctgggaactgaccaagcattgtgacttttactaggggtgactaccctctgcttcctgactttattcattttcccttgacactgtccgttatcaaaatcctgtcttttccttttaaaggccctattgaaatcccacttctctgtattctcaaccttctaagcttagctaaaatgaatctccccagcctctgaactctcatacacatgtggtgatcatagcttgttttatgttacatttatttgtgtatatcttttgcccctacttgactgtacattgatgctggaaatgtgtcttatttatcgtcttattatttaaatgccccacatcgtgctttgaacatattatgcaagctatggaagtttactgatggttttaatgacactggcttttcttctgcatttagcccttaatagaacatgttcctgttctatttatatactattttgtgtatgtaaacctatatactaaaagacaaaaatgttgtcacattttatatggaatctcatagaatttttggctgacttttcattctttttgatgttaaatattaagattttaattaatcatatgccaaattttcttatgcaaaatattgtttcttatagataatttgcggtaaaagcctttcagtgaatgaaatgactcttagcactttgaaagaaaaaggctacaaagctgctttcattggaataggtgagtagtttactcttaaatatatttatttataatgtatttttttatttcctagcaatatccagaagaatgactgccttcagacattttcgtgatgaaagttatatttgttcagggaataacagatagaaatgattggccaagtaactaaatttctattttataagtaggagtgctgtttcaccttaattatggagagatttcggcaagatgtttatcttcccattctttcaccacaccatcatcaccagtgagaatctctaggaagaaaatattttcaagtcataccaccagaaactcagaatctgtctagaggctgtagctttctttttatgataaaaacaattgattaaagtgatcataaaggatggagttggctcgttccctttgctattcattttccaaaattttctaaagacttttcttatttggttgaattttttaaatgtttcatcagtgttctgaaagtcccatagacagtgtattactcctgaggcactcactgtatactgttttctcatattttgcctaaatatgttatggagaatgagttttctaacatttttcttccacttagtgtttactgagagaccagagagaacaagtaagttggcttgacttagtctttgcctcatgaatgtcatattcattctctgatatgatttgtactatgggcaattacggcatataaatggagtatgttaaatcggggtccccaaactcggggccacgaactagtactatactgttaggaacctggtcacacagcaggaggtgaatagtgggcaagcgagcattactgcctgagctctgcatcctgtcagatcagcattagattagattagaatctaatggcattaaattatcataggagtgcaaactctattgtgaactgggcatgcgaaggatctaagttgcatgctccttatgagaatctgtaactaatgcctgattatctgaggtggaacagtttcatcctgataccatcctctttctccaacccggtccatggaaaaattttcttccatgaaactggtccttggtgccaaaaaggttggggaccactgtgttaaattgttactcatttttaatataaactcatcgtcctgtattttactttgtctgtctcttcggcagttcacactcagaatatgaagttcgaaataatatctctttaagtgatcacacactgagtaatgtttgttttgcagctgtcctttttcattgcctttctgaagtgcagtcatcattaatgcttctttgtctactaaacttttcttatcaaaatgccatttctaagaccatgcctgtcagcccctttatttaggcaaaaaattatggaaagcaatataaatttacactgtcttctagctcctaaatgtctcaactgaacctccttcctttcagaaaattttgggtgccattgtcattagtatctgtctgtatgatcttaattacaatattatatttattgtgtatatcaaaagtaggaaggaggcaagatctgatattttccctgggttctatttttaggcatactatatttgactttagctttacttttcaacattacatttgtattgataatttaatgtaaagaaattgggcaggtgtctgtaagttccaattactctcaataaacacatgatcaaaaatgcttggtcagtaataagtgaaaaatttcatcaggctttaggtctgcaatactaataatgttatcaaataactatttgaaattcaccaatgtactaaaagatatgttttccattatttgagtatatactaatacaattattaatacatgtatctgtaagaacttcatctacaaagaatctttgtactgaaggaatatggaccaataaaataaccaatacattgaaatatccaaattaattacataagcaaattattccaaaaatgtggaataattaaattgtttatcactctgagtagttataaccacgaaacaccttctaactgaaataatcaatagtgtttcagctttttaatttaattttatactattaagtccccttaagtatattatttgataatgctatactggttcacaatacagttgtctccatttgactctgcactgaggtgtgaatacagcatttagaatgtagagtcctttcatatttatgtgctgtgcattttcatgctgagaagtgaatctttgacattttggtgtagtgatgtgaggaatgcagttatgctctatttcagtattttgtatgaaacatatacgagaaaaatttcatcatgtcaaaaagaaaagcttcagtctgtggaagacaagtagccgtattctctaggaaatgtttatttgacactcatgagtgtcgatttgggaatttatgacctttgtattaccatataactggcggttacttggacagccacacaaccttacatgtttttgttcattaaccttgcttccatattgtaattaaacattactcacttattttatctaccctttctcactgattttgtaggaggaaatgtagaataggaattccatattatttaggatatacatttgggcagtttcagaaaacaatagagggtaaaacaatataaacgtttagttctttctcatgtaacaatgtaagccattttcaaacctgaattccgtctttggtctgtgggtagttaccatgttcacattcatgctaatagaagtgggaaagagggaagcagctccttcagtcttatatttatgagccggaagttacacaaatcaattcttctttcatctcattgtctgttacctgatcatataagcatggcaacagcagagggtgctgggaagtattgccttttgctgggtggacataatccccatcaaacgtctagaatcatagggaaaggggatgacagatattgagagaggatagaaatgaaagtctctgttacaggtgtgcatcatcattagtatttgacacaggagatcagtaaagtacttagtagcaaagaaaacactcttagtacctggtgcatacatgttggttacataggtagtttttaaaaatggagatggtaggccaggcgtggtggctcacacctgtaatcccagcactttgggaggccgaggcgggtggatcatgaggtcaagagatcgagaccatcctggccaacatggtgaaaccccgtctctactaaaaatacaaaaattagctgggtgtggtggtgtgcacctgtaatcccagctacttgggaggctgaagcaggagaatcgcttcaaccggggaggtggaggttgcagtgagccgagatctcaccactgcactccagcctcctgacagagcaagactccgtctacaaaaaaaaaaaaaaagagatactttctctttctgtagttggaaatgccatagttattaatcttatgtgtttataactactatcttattctacgttagattgtgtaaaataaaaaatatttttaattaactatgacataatgaagatagctcattaagcccattgtattaagtcaagtctgttcacatgtttcctgattttaactatagtgcatgatattgctcatgaaaagtctctcatttttagagttttctctaatactaccacagtccaaggaaattatctcattgaatgtacatcattgttacttctaaagacttatgtctcttgaaccatgagaagtttagcttcttctaagtactgagataaagccctatgtcttattcaaaattagtctgttatcttcacagtaattgagtcattgttaaagactctaaagttttggtggttttactgaaatcagagcacctggacagcatgttactgaaaatattgagacgtagaattggaacatctactatacaaggcttttaaaaaatattggatggctctctttgtttggtattgaaattgacataataggttacaaccattgtttcttcctttttattttataaaaataaccagaaaataatagaatagaacatatcaaagtgtgttggctatggttagggcaagtgttattttgtgaaaaatgtttttcacctgtgtgtatgtgtgtttgatgtgtgtgcttgcacgttcacactgcattaaaataaaatgtattttttaaatatggctctagttaaagtttgatagccaatgctatacaatgtaagggctctgatggactaaacacctttttcccatagtatactcaacacctatcaataagtagctattagtgagttaaataagtattgaattactacaatcaatgtcccaaacactgtgctaagaatttaaaaaacaataaagaaatctgaattcgttgtttaggttggtattaaattgagtcagaaatatcataagacattcaaaaagaacaaccatattgcacaatttcaggagtgggacgtagtgtggtagacgggctggacatgggtatagttcctttttttttttttaaagttctgtgggtaattttattctagagccaggtttaagagtcactgttatagataactgaagagatggacccttcgtctttgttttaaagaagcccatttatttttctctttctgattgttcatcttctgatagttttcatctcatagcctcataaaacatgatagtgccaaaaaggttaaacaagcatgcaagggaaagaacatccagtaagacacatttaggtaactgatcaaactttatatgttcttctgccaagtttttctttctttgaatttttgtttttagaatgcatgagaaagaaggggctaaggggaaaatgcagtgaaatcaattataatagtcacagtagacactacgaaacaggaactacaggaaggtgttgtagagatgaatagtctttttcaacaccaagtgctttacttgtgtccacccaaaagattttccttgaacttacttcttgctaccaccactcccctcacttaatgccactgggatactgctatggcctcaaccagtctctttggccaccactgttcacacaacaaaagtagtaatcatgctgaaatcagatctgatcattattcctcactaaaactcttccatagctccatatttccttccagataaagaaaagtccccacgaaggttttcaaggctcttcttgatttggtcacagctatgtctctagtcacttctcctattaaattatgtgattcagccattctgaactgtttttagttttaccttatctgaagttttttaacctcaagttttggacatggacctagagctatctttgttttcatatttgtgttcttgacttcgatgctttttttctatttgatacaattattttacttgtgatgatctactccctaccttcatactttagcctggattaatgaatcatcttcctcaccccccaccccacacaaactctgtgttcctgctctctatgttcagactggactttttactgtagtatagcacttcttcaccttctttattataattcactagttacatgtttgtttccaccactagaagttaagcttcttaaagactgtagattctgtctgctttcttcattgacagatgtttggtgcctagcaaagtggcgggtacatagtaggaactttatacgtatttttagttattgattttaaaatgcaactcttttgactgttttccaaaataaagtaaatttataggttgcttaacaaagttggcaattttggagtattataacattgcccaaacccagggggaatacattttacattattataattttggtattacactattccaagtaggaatagtgatattagcagtggtgatattggtaataatagcagtaacagtgaataatattccaggctcaattcttaacatgatctatccttttaactcttaaaatggtccttgatgtcgatattcttaacactctttgatgggtaagaaaattaagactatcaaaggtaacagaaaagaagtaaatggcaactaaagcatggaaagtgagttttataaagaaagtaaaaaaaaaaataacaagtgcaaatatccatacttcaattgtgactcaaagccaacatgactctgtctacatttcagcatctcacttaagattcttgaagagggtaagctgatactcaagaagaattagtctttatatttagcctcatttttctcattgttatcacaaattggttttcttttagttaccatcagaaaataatatttttttaaatgtgaagattcccaaatattataacagacaaataacagataattataatttaaaaaatccatcgagagattgtggtattaaatttgctacagagtggcctttagttaaatctctcatgccttcacaaagccagaattattctctataaaagttattcttaattggcttcttaatcaggaatttttaaattgtacatagttgtgtatactttctatttattcagaggaaaatgcaattaagtttttagaccatttgctttacttctgtccccagataaaaatgtaaattgtttagtcactatccacaactatgaatagattattttaaaaaataaacctgacttaattttaagcaaaaagcaagtcttgagtattttgccaatctactttttttaatttgtaatattgtttaatctactgtcacttgtaagtacttcggtgtaattgtaaaatggctcccaagattttggaaatgagggaaatagaattccagctgagagttcattaaatcattacttaatgagttcatgcaaagccccagaaggagataaaatagatgtagggcaattattctttgatcatattaacatatctatagaaagcacatattaatctgcagaagcaggcaatgggggctggtcatctttagaagtattgaggaagaaaaggaacctgcagaaatatcagcaatattgacagtggctcttttaaggcacctgaatcaatggaccgggagttctttgagcccaggtcgtaagatagacagagaagtctattttagagacctctgaatcttcttgttctgattccaagctcaccaaactgccactgattcctaaatagtttgattatgggagatgagcgtgggaaggggaggttgccgtgaggtgagatggttccactgcactccagcctggatgacagagtgaggcaccatctcaaaaaaaaaaaaaaaataatagataaatacgtaaataaataaataaaaagaaaagacaaaaaaagaagacaaaagaaaagaaaagaaaagtttattctgtgttcatatataatgaaatatatgtcatttatagtatatagttttccttttgtcatttttggttgtgtgcatatatccctcccctgtcacccacacaaacacagtatattaaacatttatgagagttggtgttggtttttatccttgaattgcataatttcagcacatttcttaacacataatacaacatcaataaagttttttgaagttaagtaattggaaaaagaaaaaaaagaaacaatggaagaaatgaaaagcaatgtaataacttgttgagaaattttgagattatacttgattacttcactgcttaaaattcatgcatctttccaagcatcctcttttatctttttttgtttttgacaaaatgcaaagacatattcattagttctgattaatgactcaaagccactcttaagtcattcctactttgatgccttataattatgtcaagtattacattactgtgctgaatatcagatattttctttaagtatttttggttaatttttaatggtagtactcgctagggtatttaatgagcgttttgtgatgaagatgatgatataaggaaatgttttttaaaatcatggctttttctactcgtagaagtctttacatgttgtagatgatcaataaatatctgttgaagtattgattaattattaactctaattaaccctattaactcatgatgtcttccgtattattgtaaaaaaggagataatttattaatcactaaggttattttaacattatacagcttatattctttttattttaaaaaaccttttataaaacacaaattatattttaaaatattttatcttctttgcatttaccttctttgtgtttatcttctttgtatttctttggatggagacatggaggaatttttattatatttttctatatatgtttcatggaataaagacatattttacttatggtagttacctaaattagagaagtaaaacagttctttttggtattttcattgtttaagcattaattttcttttagtagtttccaatggtttaattaactcttaaagtgaagttgataagagaattggaaaattactgaactaagaaaaatgttgtctttcaactgctatttatggctgccagttacattttttgtgggagataattatcatttgaacctggaaggggttattagtgaacatatactatgggtattatcttagtcttgctgggctgctatgccaaaatagcatagactgggtggcttcaataacaaacatttattttctcacaattctggaggctagaagtctgagatcagaatgccagcatggctgggttctggtgaaggccctcttcctggcttgaagatgtctgccttctccctgtgtgttcctatggcctttccttggtttatccgcatggaaagagaaagacctctgacgtttcttctttctataagggcactaatcccatgatgggggccccaccttcatgagtttaactaaaactaattacatcccaaaggccccatctccaagtaccatcatgtttgagattagggcttcagcatatgacatttgtccttaggatcatcatgatgttttgttttgttttacgtttggtaatcatactataggtctgcattgtcctctaaaggtagaatattgatgttgaaggataaattttaggatacttaacaaaattagaagttactgagatagtggatattgtcaagaagacttttggaacatcacagtacacaacccttcccctccgcccactgtaattcaatgaagctaaatgtggagaattcaagactacattgtattcatgtgcacagtacacagtggttttcaaatagagctaggagatgtactgttggatagctattttcacactacaaaccacacagctcttatcttacgaatcgctgctatgtaaagtttggtgaactgaagaagacatacacagaagaaaagaggggttagtaagagaaaaggaaaatggcatggaaatggcagggattgatgcaagttggaggaaactaggcatatttccatatatgatatatatttctttctagaacaatcttaccaaagtacagaaatgtgaaattttgggggataatttatgttttatccgttccttatttcctgtttattccagttaagctatgccatctttcgttagcaggattaaagtgatctaataatctctttctctgtcatttaaacagcttttttgactttaagtgcttaacacctgtatactctaaagcaagaccaaagcttttaagggactgcattaaatattttaagtaaatctattttagaagcaatgcaattgaaatttatatcaaatcagtttttcttcagatcttgcctttgaatggcttaagaggtgtccaaaacagtcatattgttcccaccttcccaaatacaatctagtttggttatattacttttctatttcttaaactcatattacttagtactgttataagttatgtcaggaatttatgggaaaaacaatactgcaagaatgattacaatatgaagtcagaaacataaactcttaaaatgcattattaagcattaatactgtggacatctaagaaagttttatttttaaaacaacgttttgacttatttactttcctatctcaaaatatgtaaggaatcttgatgtgtgttgtcatcttctgattaaccatgcagtgccacctggtgtgcagatggaaagaacattacacatcagaggctctgttcacacccacccccaccatacacaaacttacatggcagaaagttaacagatgttcattttgcttttgttactgagatacgttgtgcatccaactcttaattcataagttaaatttggagattaagatattggtatttgggttaatcagtcaaagattatattaatacatccattatgagaataaagtaatatttaattggaaaattgctgctttggatctttaaagtcttattttgtgtttctattctttcctttttttaaaaaaaatacttggtagttttgtctattgagccttatcatttatattttactaataaatttatcattcctagaatactgtagtttaaaactgattgctatttaatttctccctggttaagtttccattttacaggaaaaaatagcccttcttttgtctttggagattgtatcacagtcaggtatttttccacttctcttactcttttaatgccactgttggttgatcacattttaaagttggttgatcatatttttaagcttctgcaatatacctagcagtgtgctagcaattatatgttacagaaaaattaaagaggttattatatatttagaaaagtaattaatgcattttaaaaataagaactttgtgcatataaatataataaatagaatagctacatttattgagttctgtgcaaagtcatgtttaattctcacaaagtaattttggattggtattattcatatctctattttacatttatgtaaatggtgtctaacagatattaagtaaccttctcaagtactagaacctggatttaactgaggtccctctgaaaccaaagccctactcttggctaatacattaagttggcagaatttaatcattttttaaaatttatttatgctttcttaaaaaatattttaaattaattcttttttaaaaattgtggtaagtacacatagcataaaatataccaccttcatcatctttaagtgaatagtgggattaagtacattcacatcgttgtgcaaccatcagcactattcatccacagaactcttttcatcttgcaaaactgaaactatacctattaagcaacaaatctatgaatttgactattctatgtacctagtatgggtggaatcatacattatatattttgtgtgtgaatggcttatttcacttagcataatgtctcaaccttcattcatgttgtagcatgtgtcacaattttattcttttttaagactgaataattttttatgtatatatcacattttgtttaacattaatcaatcaatggacattggatggtttctgacttttggatattgggaataatgctcccacaaacataggttatacagatatttctttgagtccttgatttcatctcttttggccacacatccatatgtggaattgctagataatttggcaactctgtttaactttttgaggagccaacatactgtttccaaagtagctacaccattttatatttcatcaacagtgaaaaaaagttccagtttcttcacatcatcgccaacatttgctagtttgtttttgtgtgttttttgatagtagctatcctaatggatgtaagtagtatataatgatttttcatttgcttttcatttgcagcctgcttgttaccaacagaaacttgcagtgataatatatagataaaaaaaatttttaagtatataaacatatgattaatcaacaagatgaattagaaaataagaacctctcctataaaaattaaatggcattcacattttttgatattttgagggcctcaattagattatatgccaaagggatgaagatagagggccaaattcagcatgaagaccagttttgaattggcaaattatagagaggactattaagagatagcaaaatatcttatatttaaatttctaactaataaagtgagttgtctacaaaatttgtctataaatgaacagatatcaaatattttgtatgttgtgggctgtatggtctcttttgtagatattcagctctttacatttgtagtatgaaagcagtcttagagtatatgtaaacaaatgaatatggctatgtgccaataaaactttatttaaaaaaatgagtagcagggcggatttgctcagcagatgatgcaccaaaaaattacttaagaacattagttgcttatattttcttcttgttttaagaaaaaacattttaagtggaaatctagttgaaatataaatcaagtgaacttttgtctaatagaacctgacttgttttgcatgcatgcatctgtttgtggaatttaagaacaacaacataggtagcagaagagatagctatccctgattattttgtactagaactttaaaatagctgaatttttgtgaaaccccccatggtgagaaaccaaccttgcttctcactccttaattactgttttagcaaatagcttatttgaaaggtgtatccaaaaatatgttttcctgataccatgcttgtgttattttttttaaatattactaacacaagctgctgtttttatttctaaagtgtagtgttttgtccttttaaagtacatcttcaataaataactttatacttgattttgtaatcaaagaaaaaaaacacacacacacaaccaagaattaaaacacagaaggggccaggtagggtagttcatgcctgtaatcccagcattttgggagggtgaggcaggaggatcgcctgaggccaagagttccagaccagcctgggcaacatagcaagaccttatctctacaaaaagaaaaaattcgccatgcagagtgggatgtacctattcaataggctgaagtgggagaatcacttgagcccaggaggtcaaggctgcaatgagccgtgattgtgccactgaactccagcctaggtgacagagtgagattctggttctgaaaataaaataaaataaaataaatcacagaaggaataaatgagaactgaaattagtttctgtgaagtgactgatggttctgaaagtatatcttaaacactattaatgaatggttttatttttcacatcaatttttgataacttaagaaaaaagaaaatatacatatacaaaaaaatttatcttagcctctaggctaggacttctataaaacctctttaacttttccttttcactttattgttctgcctctggattcttcatgatgaattctaacaattagcacctattgacttcagccaggaaataacaaaaagccatccagagcatagttccttttattcaaggtgctcagggcagtacagtggaattattttagaagatgtccttaactttttatgcaagcatattcatcatcttgctatgaataacaaataagtacacatttgttatgtagcaaaatttgttaaaaaccataggaaaagtattactgataaattaattaaagatagactcatctgaatactgaataagaaaaatacctggatattgaatagaatttgtgatttttcttcatttagaagataatgtgattaggtagaaatgcattcttttgtggtggatcaaaacatgttagttcaaaatctgtttgatctattgtaaaaatttattaaattcaagactgactaattcaattttttattccttttgccttaaactggattcagattggcctttgtgatacttagaaaaacacaaaaagaaaaagcaaaaataaaaacaacaatgtgaaaaaagattgataatgaaaaatactattgttattttatgggaggcatgatcacttattatattaatgtctatttgtaattactaaaatataaacattttaagtatatggactcaaattattttctaaagcaaaccactctggcacagtcaagtaaatacattattgggattttgtgtgcatgtttgttttcctctcctgttgactgtagaaatatttggttaatggagtactctagggcaagttgaatcaatgttatgtttgtgccttttttcccattctaatgtggttttggtagctatattactagaatttctgacagaaacattctgggtgataatacgagatcatatggggcttagaaaagacagagtattaatctctagtgattgatccatctgtgaggttttctgttacagtggtagagaccgaaatgtgttagacttttagtggtaaagcaatcttatgtttttctgcaactgctttccactatatttaagtatgctctcttttcccctgtgtatgtgtgtgtgcgtgcatgtgttctagcttccagccttttacaacttatagtcattttttctgaaaactggaagcttgaggtggcagagtaaggaaaaactaaaattcataaaggcagcattatcttaaagttattttcactcgaagacccttgtttctgtaggatcagaaagcagcctaaaatcaacgagttatatgagaagcaaaattccctaaagaggttaaaggttttggactactaagacctctaataagaggaagcaaaataaggcagtgactaagaaaacttttgacttatagtttttatacccaaggtataaaactaatgtatagttatatatatattatgtagatatacaatatatgcatgtatatttgtgtgtgttttacttaattatgccctcacaaccttaaaatactatttgaaatagtactttaagctatagtttaaagtactaaactcatagctatacatatatatgtacacacacacatatatatgttttgaatagttttatacctatagctatatatatatacacacacatacacacatatatatgcacatacacacacatatatatgccctcatgaccttaaaatcctatttgaaaaatctaatatttataagtttccttagaatccaactttatcattgataaaatatcaacagtcatgtgcttaaagtagtaataaaataaattatcttcattctcataattttaataatgctaaggatttcacccacattaatgcttatataacttcatttactcattcagtaaataccaagttcctgatctgtgattaatgtgaccttgttatcaagaggcttacagttttgggggagacagacatgtaaatattttctaatctgtgactttgactattccttttttcccacaatatataacacaatataagagcatccaaaaaattttgctcacttacatgtatatatttctattcattcatcctagactataagcctctgtaggaaaaggataattcaggagacatgctggggcagggattaggagtgcacccagatacagggaatgtcatatgtaacagctctatattcttgctagagttttcacttccagagacgtgtgctgacaaatagggacaaacacaaaccaggaccagattcaggagacttcacatggcaatgcaaatgtgtttagttatctgtagttattgagtgtttactttgtgctgtggaaaatgaaggattttgatgtgagaggtaagagattagtgagataggtttggtcgcactgtgaaaatggtttggagaagagcaagaccagcactgggtgatttttacattgtggctattggaataattcaagcaagagaaaattgaggaccaaaggtagggctgcaagagctgagagcaggaaacaaacataaggaaatacaatgaatgagtcttggttactgattagatactgttagtgaaggacaggagtcagaaggagaaggcagggtaaagatctaagaaataggtacaagtcgggatgttttcaacacttcttttgaccaaataaatggatggtggtgacaattacccaataaaataaaataaggggagattatgagatctttcctgacttcttacgtttgagattccttgtgacaacctggtggaaatatccaggaagctcttaggtgtacctgattagttctggggaaataatatgagaagtgtgggcaggagaggtagatttggtatccttggctgtggcaaatgatgctagtggcagtatctcctcgctatttgctagtatgaatcttgaagctagttaaatgcaatcagtatgttatagttcatgattgttgggagtaatagaaataatataaactaccttttcactgaaattggcacacagtaagatgccatggcattgacgagattacatatttagttttcataaccaccctatgcagaacgagaaaaaattatagcccagtgaaactgtgtgactaccaattccacagagtgtgatattcacacacactgaaatgaataggctctaattccgtatctaagaatattatttcaacatgatttattcatagtgtgttttggtgttgccattgccccatccttattttcaccagatcatatattagatgaatctgtgtggctagagggattttcatgataatagggcaaaaaaaggttagtccacatgatgactaacttttgttagcactcttttttgtttttgtttttgttttgagacagagtctcgatctgtcgcccaggctggagtgcagtggtgcgatctcagctcactgcaaactctgcctcctggattccagccattctcctgcctcagcttcccgaatagctgggattacaggcacgtgccaccacgcctggctaatttttttgtatttttagtagagatggagtttctccatgttggccaggatggtctcgatctctggacctcgtcatttgcccgcctcagcctcccaaagtgagcactgtgttttaatatcagctgtttgatgtacacagctggtattcatgaatactattgagcctgctaaagagttgacttggggccaggtgcggtggctgacacctgtaatcccagcattttgggaggccgaggcgggtggatcatgaggtcaggagatcgagagaccatcctggctaacatggtgaaaccccatctctactaaaaatacaaaaaattagccggatgtggtggctggtgcctgtagtcccagctactagggagattgagacaggagaatggcgtgaacctgggaggcggaggttgcagtgagctggagccgggatcatgccactgcactccagcctgggcgacggagcgagactccgtaaaaaaaaaaaaaaaaaaaaaaaaagttgacttggaaatactaaatatttcctatgtgtgaaaatatatactttttaaaataaaacttgatattatgtgtgtatatgtgtatatacacgtgtgtatgtatgtatatacatatttaaaaagagatgaatgggagaagaaaatcttttacttaaaaatattagattggggagttttaaaaagcaaatttccttaacattaattaacatatagcttgttttacaaaagctgatgaagatttatttcatagatgcatgttcatcataaaagtgatatgtaaattcattccctttttcttactaaccaataaagttattctgcaagagaaatttcaatatttattgtaatttgattgactttaagtttgcttcttccatagagctttgttcctggatttctatatattttttttattttatcaaagcgtagtatatgtcttaacacatttaaaaattatcttattttggcaagtatcaactagatgggtctctaaaattaactttttcccatagtcacagttaaatattgtattctcctaaagtaggggaggaaaatatgcattatgcattatggaaacataacatcagtcctcctcgattctatatgtttccataatgccgaataattgaacatatggtctctaccattgtaggctaattggtatacacacaagaaaatgagggggaaggaggtggagagaacactgtaggcaagtctttgatcttgggatttatgtttaccctcttcaaatgaatttgtaataatgagttcattacaactctaatatgtatacctacatatatgctatatgttaaatcaaatgagcatatatttttaaacataactggcattatgctaaattatttctcctctaatatgtaataggacagaaccagaaacccaaacctgtggttttctcaaacttccatggtacctcatacaataattatggagaggtaaatcatgatacagtggcttaagggagaagaagaggtgagagtttgtcagttgggttttgttttcctaatatagaaatataaacacattttatggcaagataaagaagtgagtagaaaacagatgtttgagatgataattaaatttaagcggggagtgagcaaaacaggaagagaccagaaaagaagaacataggcagaaatgttcgcttttgaaagttgaaaggatattttttttcccattgacacaaaaatagtgaagacagaaaaagttctaaggtggaacatgtcagccaagtgagttcactttgctttagcctcttcttagtgaagtagtaaggttttatttactcctttgagtaggaaggctttactagaatctaaaggttggtggggaggggtgaagagagagagagaaagaaccttgagtcctctccaggaacacacagaacagaaagtgataagtagtgtgaagaaactgtatgacatagtagagaagtatatacaagggacattacattgttaattaattttacatttatgatgggtcttaatactagtttacatttatggggtggaaggaagcaaagaataaataaagcattttattttaacagagggaacaactagggatgatacctttattgaacattagttttattgtttataattaagataaaagtaatatattttgtactttttacaatgaaattagtgattatttatcaaatggatattctaggaaacctacaaaattatcaccccttcaagcatatataaataaaatcaacaaacacacaaagctggtttgagccagttttatccagctataaataatactcaggttgtaattaattgctttgaaaagaagttaatcctatcaggtcattaaataaccccattagtaaattattgtgacaagcatattagttgttaaatacaagaacagtagcattttagcaaattgttagtccttagcagctacttttattttgcttaaatatagtgatagaaccaaccaccatgccattacagagtattactattggaaagaatatagggcattttctgagttgaaagttgaagatgaattcacctgtaagcatattatgctatgtgcactgggtttatttcaaaatcagatgaccatatgaatatacaatactcatatacagtaaggtggaaattgaagaaatgaaggtgaatgtgaagaaacaaaagaaagcaagaaaatgtatgtatgactcgatgaagggcaatgtaatttagcattcattcaaaaacttttgagttcttatactatgtgcacttttaaaaatttcaggtaaacttcacagcattacatgaataaaatagcaagttgaaaaatttaacttgctgttttgaggaatgaagtaattcattttaagctaagctttcaactttagttgaaggaagaagtgagtactgatttctgttaaagacttaattagccatgtattaaagaacaatagttcaatatacatggcatggaaaatactccccattatggattgatatttttaaactgtaactgttcagagcaatacagataatcaaataatatccatcactgaatatgttgagctgataccactcttatacaaatgtacagactgtatttataatctaaaaattatcattgaaagctttcccttgaatttccagactgccaatttataagcagcctggttggacatatgtaattatatcaaatttatatattcattctaccagcatttactatggtctgtctaggtacctgttattacgcattcaatgaaggggaaaacatttttcttgacttcacaaagatcagagattcattgggtgtaaagtaacataattacaacaaaatatggtaataacataagtagtgatagagagattcccagagagttgtgggcgcacaatgggtaggtccaacattcctgggatgacttttaagtgtgaggatgtgtattgggtcagggagggagccatagaaaacttcctagaagaagtggtgtctttactgagttgcaaagatgattaggagttaacaggaaaagagaagttagagggagaaggtttttttctgaaagatggttccagagagccaggtgttcagtgaactagcattataaacctctagtgtttctggatctgtgacagtccaattttttagtctttaggctgaagtgtaaggcaagaagcaagtcatacagtcatagagggcttgttagtaggttagaaaagttgggcatttattctactgaatacgaaaagtgatgaaaaggttttatgcagtgtaggctttctgggtagatgatgaatttaaaagtgatgagactggacatgtggagatgggctggacagaggttatacagtgcaggagagtgatgattagagattgaacttgggcaaatgctgaagtaattaattattatttaagtctaaattcttaggtcttttttccttataatttaatatcaggaactttaatgagaacattaaaaaataaaccactagtaagaagctgttcgaattacacgatgttttaaatttatgtggcttagtgttttcaatgttgtatttatccctatgtacatataatcaaatctaaccattatcataaaagtcaaaataattattttcaacctaataaagctatattttcccagtattgacattgtagaaatgatgtattttgatcagcatttgcagattatgtaagattattcctataattggtttcaaagcattttctcatatttatctccttgaatattaaacctcattaggaaatatatatttagatatgcagagaagactaatttataaaactaaaacataaaactaatttaagtgtgtaatagagcattaacagccattgaattctagtataaccaaacaagatattttcttgttgttttggcttatttgctgcaaactgtaggtactatctgtagaataaaactagtactcatgaacagaaacaagcaactgaataccttttaatttcagtagttgtgttcctataggtctatttcaactatctattggtctcaaaagtgtttgaattttcatgtgaaattcaaacgcaaaagctgctgtttgctttaatgattattcaggaataattctaattagcaaatctgtggttccattgtttctagtgcatggtctctgagaagaatttcagaaactaccagtcttcaacattttctgctagttatataataaatatatttctaattggaacacgttattgatgttgaattatcagttttctgataccgttattaagataaaaattgcagcataaactgttatttctagacgcccgtggttcctttgttagggaatcatcttttatcagatatatttatgactacaagaagatggatggttgttcatttacacacaatgtattaaaaataaaaccagttgcttagtcagtaatggcaagagaatgtgttttcactgattgagaggagatcattcaacaatgtcaaaaaataatttgctttatattacatttgcccataaaaaatattgacaactttataagtcataagagtgaggcagctgatgggcaagactgcatgttttagaatttggaaatttaatttaaaaatacaaattttaatattctttataatttttagtgaataaatatctacagaaagtcataactcattttgttttccctaatccttgcttactggcaggctaattgaacagtgaaggtcctaaagaatacaggctgggcacagtggctcatgcctgtaatcctagcactttaggaggccgaggtgggtggattacctgaggttgagagttcaaggcgagcctggccaacgtggtgaaaccccatctctactaaaaatacaaaatattagctgggtgcagtggcttgcacctgtaatcccagctactgtggaggctaaggcaggagaatcgcttgaacctggtagatagaggttgtggtgagctgagatcatgctgctgcactccagcctgggctacaaagtgaaactgcatccaaaaaaaaaaaaaaaaaaaatacaatcatgcagcagagttaagaaattgcagttgagttttgaatcaagcccaagttcattcttggaatattgaccatttatagtaagcaaagtcacacctggaaatagatctcatagatccagtcagtcttttgaaaaaaaaaaaaataaaaaattcctaagcattgagacaaagtatgatacaatttatcgatggaaattcttctttataaaattagtttaatgaggatttcatttaaaaatggcagaccaaatgcaagtgtatctctatatcctgtcctggattgtcacaaaaatgaaagcaacaggatttgtcaaaaatcataagcccagaaggaaaaaaagaatagaaaggagcagaaatgacaacattttggaagttgaaaagcagatggctacatgaggttggacttagcagacccaagaaagctaaatccttaaccagactggagaagtatcataatgtgtactactgaacctacttaaggtttcaagattggtagtaccaggtagctgtggaaataagagtgaagacaaggccaaaaaatagggaatttatgaagagtgtattaaaaaaagtagctagaccccttgattccctcattcatcttgagtagcttgagaattctgttgttcagtaaagaggataaacccaatgtctagaccagaggacacaagacagaaagatcttccgtgaaaagaaggggattagtgaatttctgcatgctacaagtggagaacattattctccttcttcttgctgggctgccagaacaactgctccgtaggtagaatatgacagtttggcttggttatttgttgcataagatgtgttgttgtgaattataagattgctagttactggaaaatggtacatttagatttacaaataaaaatggaaatatgacaaaattagagctcaggaaatgtaggtattttgaaaagtcactcttgtcttctaagcctttatttctacgtaataaataatgatgttctttagcagttatattattaaaaagtaaaaagtaaagtgtgtccttctttttagtttcctaggcatgctaacccttttcatcctgatttctcccaaaacagtgaaagctaaatgactcaaaaagaacctttaacgtcaatatttctgttaactggctcacaacacaagctaacatgagttcattcaaatttatatcaaatgtgtacagtttttaaagtttttgtttcccttggttggggcggggtggaggcagagtcttctgcagcagtgctttgtgtattcctatgcttgttattctaatttgattgcttctgctataaaaagactgtttttaagtattttaacttttattgttgtcaccaaaattttaatttccttgtccaagctgaattttagaaatcaacttgtttaagcaaaagcaaagcaaaacaaaacaaatttaactccataggaaattacttctattactttggatctgggaagctggatgtatttcagcaggcagcagtggaaggaacttgcaaaaagcatcttctgagagctgaaacagcagtcacaaatgtgtctcgctctatttgaggcttaacagagtaggagagctaagcttcaagagaccatgtcttagcctctaaggaaaaagatgtacatacttttgtgtgagctgtgcagtaattttaaaaatcagatccatgacacttcattgtgggatcccagaggattttgttcattttcagaattcctcttcactaaattaattgccaaagtttttttcttaggaaatgcaagggtcaagtatgcttgtgtatattcaagtaggtcacaacagttagaaaactatttctgttgtggtagctgatatggtttggctgtgtcctcacccaaacctcatcttgaattgtagttcccataattcctacatgttgtgagagggacggggtgggagataattgaatcatggaggcggtttccccatactgttcttgtggttatgaataagtctcacaagatctgatggttttataagggaaacccttttctctttgttctcattctctcttgccaccaccatgtaagacatacttttcatctgctgctgattgtgaggcctccccagccacatggaactgcgagctcagtccacatggaactgcgattccatttttctttataaattacccagtctcaggtatatgtttatcggcagcatgaaagcagactaataccatagtcatttttattgactattttcacgttatttttaattattatttaccatttaatagtatgtctttatttttataaaggacatttctgacaaatagaacaatgtagtgatcaaattattctttctattggtatgcttttgctgcttatgtcaaataatatgtattggagattctatacagaaagattatatacaatagaatacctcacataatcgtgaaaatatatggaaatatatattactttattataactccctgaacttttatgaatattaaagggtcccataatgaaatcttgtatcttttgtgaaatcactataaaaattatattatattggtcagtaaatctttatatattggctgatgtcatagaattccttaaagaatttagtgataggaaaatagtttggctcctaatgagtcagtaagctttctttcatcagatattgatttctaataatttcattttacttcaatgcaaaaaatctcagggttaatttcagtgctcaatcattgtaattatctatccatcatattagattatttcaaatgcgttatggaagcaggacagtgtatatttatagctacatattctgtaatctatttggccctgtgcaattctgtgaatggcatctttacttaactcgttaatttttgagattgttgggttggctaagataaggtgggggttataaactgtagagacaccttgataagttattgtgcacatgtatggagagcacacgcacaatattgatcactgctagatacaaagttcagacttcaacagagatctgattctgatttttctccatcactcttcagtctatactcacagtttcataattaaagccttattatttcgtataaggaccataccttatgtttatcctttgttaaatgtgtgtgtgtgtttatgtatgtgtgtctggaaggatagaattttatcgttattactcatttaacacttagtacaaaaatattgcagacccttccctataaaaaggtgagaggagaaggtagggagaatagaagagaaggaaaagggggacactggtctcatgaaaatataaaaagacaagaaaaattatcatgagaatacaaagacaacagaatataagacaactaagaaattgacattttggctgggcgtggtgtctcacacctgtaatcccagcactttgggaggccgaggcgggcagatcacgaggtcaggagacagagaccatcctggccaacatggtgaaaccctgtctctactaaaaatacaaaaatgagctggacgtgttggcacgtgcctgtaatcccagctactcgggaggctgaggcaggagaatcgcttgaacccgggagtcggaggttgcagtgagctgagatggcaccactgcactccagcctggcaacagagaaagactgtctcaaaataaaaaaaaaaaaaaaaaggagaaagaaacaaactgaaattctgactatgaaaggccacttttacctgattccattctttcatttaatgatttgtcagatttttgaaaggtattatttgtccatgcactatacttgtccttcggtaaagaatttaggcatactctcttcccagagatgctcataggtgtttaaggggaaaaatattattgtagtgacgtacaaagggaggacagagaagatagataaatgaccatctagggggttgagtctttaatctggaggggtgggagtatgttagatagaaaaattgaagcaggatcatcactggcagataaagtggtgtccaccataacacggagacttgaaagaagagggcgatttggaaaactgtgatacttatgggatggcatatgcctaggaagcatgctgagggaggcagagagtaaataacagtagataggacatgagggtaggagacaaataaacaattatgggtcatatacccgaggttaagaagtttacagagtttagatttatcctagagacagtgaaaaagcatctgagtttcttgattgatatcataggaaactgccttaggcctaccatgctcaggatcttcaccatataaaatactgcaatagaaatgtccctcacccttccgccctcaaattaaaattatgtgggttttgttgagacctgaatgaaatcttgataatatgctttgcttttagcttttcttatttactctgaattcttcagatctttttctggaaaattctcctgcacaaattcacataatgtttattataaatttactgggaagggggccatatccatgtgtaaagttattagcactataccttaatgggagacagattgtgaataatcagtaatgataccaattcataatgatgaaacagaatatttataaactatttcctttttattcaattgcgtggccatttctagtttatgaattcattatcaggtcagattttaagtgaatgttagctttatgttcttataggttaggagatgttagtcaaagaggatgaataacatgagaattttttaagagaaaatgaaagtgatttctaaaattctcttttgcagcatctgtactcttgagctgtttttaaggcagtaaagcaatctagattaaatcagttgtcctttttttaggttatatgactatttatagaatgaatatagtgactcatgatccgtaagatcatcttgatttcttgtattataaattgatcattctctattatttatttacttagagaataaaaaaaaatgagaaagattttacagttgtctctcactttgttccattttctttttgtgggcttaaaaattatagtaggtagataaattgcctttctttggcttctgaaatgattttaatagcttaagctaaattaaaaaatatatctctgaatctttgttctagcaatttgatgtgttagatattaaatatattcatagaaaaagagcttatgttataaatttattattattgtgtacctaattttaaatgcctattatgactgcatttatttggcatttttaaaatctggtttgatttagctcctgataaagcatattgaattcagaaaatataataccatttaggattttttgctgcaaaatctattacgctgtaggaggtttcacatttccagaatggaagcagtaagttttgtggggtcagggtgtaaccagtgaatgaaagatgaaagtcagaactcaaaatgaagtgccttttctgtttaacactgggcactgatagaaaatgataatgtttgattaatgaacggcagccttgcagcgggtgaaaacatctgcaagaagtgatttattatttcaaaggtattggaagcttgcagtatcttgccgatttaggtatgtgtgcctgaataaaataaatgagatgcaacatgtgaaaaatgaaaacacattacttgtaaaggatgtgtcacaagcagggtatttttgttcaagtacactttgtcatggggatttttaatgctgttctgaatacaaatcatttagctggttcataaaatcgcctcagttggaattcttgcatctatcatccaagacataaatgtgggttaaacttaatgtggtgtaacatatccttaaatgttcaaattttgtatcatatacaactattaaaattgtacatgttttatgtataaagatgaataaattatagctacttaaaataacggtgcccaaagagaaacaaggtttgaggtcttaattgaacactcatcaaatactcagagctaaggcttttcactgcagctattgtggctagacatttgaataatctatcattttatgattgaacaatttttagttaggtgacatgttatatgacaaataatagaatataatgaagggaatggtactatcttaagtactaatatttaagctctcctgtgtgtgtgtgtgtgtgtgtatacacaccttgaattattcactgtggaaacagataagatttaaatttttttcaaggaacaagtaaactgataatattcataataggaatgataaagaatgtgaaaataaacttggaataatctatattagagttatgccctagggactactaattccttcttttgtggtttatgagatgtttctatctgtttgtttaacttgcctctaaaatgcccttttgtgaagttgggtgttgtaattatgagcaagctcctctccagatcaacagaatttaggaaaatataatcaccatcataaactaaaatctatgggaaaaacatgtcttttttaaaatttgaaaatttcaaattgtgtgcgtaattgttaataacttagaaactgaattggagcaaggtttaggtatctcttttgaccattgttgccttaggtcttagcataaaactaaatcttcactaaatgttttgttgaatgattgaatacattacaagattagaagaggaaacattgttcttagcagttttgctcctttttctactggagtaatggagaacctgttctatgccagggaaagagctgcacttgaaatatgacagtaaagaggatagagtccttgttctagaggagctcctagcctttgggagacagacattcagtacaacacatcacataatgaaacactttgaaaagcagaaatgtaaggggctatgagggtgcattctaagggaacatcccctaagtggagggaggagggatcctgcaagctgagttttgagagaacaaagaaaagaagcagtggcaggagatggtagatagctaggttgggaagtgaaatgatcagatttgcatttggaaaaagaattactctgtcggcctcggtggatggcagagtagagttgggaaaccttttaagaggctatagcaaggggggctgttaataagaacaggaggtaatacattgaattctaatctatccaggcatacaaatctttgccaactatggaacctcagtgtttcgcctgtgtcccagtttctgttttcttccaggaatggtcatggcttaaaaataagagtgtctttcatcattactttttggaacttcctacttccctttcttatattaaactttcaaatatgcgagtcttaattatcatttaagttaaacacagtggtattcttctgacaataacacagttccagtaagattttatgttttccaagttttgacttcactaaaatgtgaagaaaaaatattattttattatcaaagagaaatacatgattaattgtagtatgagcagatttaagcaaactaattgttatttccaaccacaaaatcattcaagatagaaaaagaaacatattttaagtaacttattcatgtacagatagtatcataagtaggatgataaatatgaacaagatttaaaaacgcatttataaaaagaatttctacaacctttttattttctaaaatttgctaaccctcactgtcaggaatatttcactcatcttttgtgctatcagataaatccagtttttaaatggaaatagtcatgatcaccttgagagctccttatgtagctgaaaatctttattaaattgatttttagtatttacttctctaggctgaataattacagttccaattaattaaagactaaaaattgcttcctcaattacactgcaatatgtaggcaaacataggaaaatataaaccttcttgatttaggagttttttagagctccttgcttagatgttaaatattaatgtagcctaacatgcttaacatcaaaggacatatagagatttgttcttcttactaattatgtagatataacatatgtaaaacaaaattaagatctgggtgtacttactacaaatataatacgaatttagattcaatataggacactgagggtctatagaggatcttctaaggggaatcttctctgactgaaatgaggtaacagtagccgtatgcttatacatagtttctaagagtcttccattccaagtgattatgattaaaaagttacttaacaattctttgttctatttttttaaagttaattatgaataatcatataatttgcctcacaggactgagaggattaaatgatttcacacagcgaaaatgcttagaataatgcctggcataaaacaaatgcttaacatgtgttagctattattataatgtattcttacctttcaatagtgaataaaactgcgtgtctttataggagaaatcagtgtctttcctagttctgattccacttttacttgatttctctttttttttaataaagtgttttcttttagtaactatttctaaacctcattgtcaaaatactaattttaaccataatcatataacaggaaatccaggtttattccccaagtatttagcttcctatcaaacacatgacatagtatctattgagatgatccacaaacaccaaattgcctgtaagtaacacggtctacctgactgggtccacttttaccttagttttaagtcagtttgcttataatgtcttagacatttactctaagccccagagtgatttccatagtcatactttctaaggttagatgttctagatgatgactgcttgattgaatccatatttagtctcactatctagattccttaccatgattatagtgaggctatcagtatggttttctgattgccagaccaaaactatgacaattgactcaaactatcacctaataatgcttgcacttaaatccagacttgacattcagtaggcttattatgactacaaggttcctttcaataataactttctgtgtttctgtaaggctgtagccaaggtgaaagttaatgaaaatctgatttggtagtagcagcaggaatgaatttaagaagatggatgagagagaaagggcagagttgagtcatcagtaattggcaaaatatcagatgtatgagttgggaaaaactagaagagactctgcagttagtaactttttattttagtagctcctttttggacataattttggttatcatacagccttgacagtttagtgatcttaatattttattaggaaaaacttcaaatatgaagtaattttatatatctgttttctcagaagttatacaattatacaaagatactatgcagatataatatggtttgataacaagtcagtaattagagataatctttttagctcattcagagaaattataaagataaaatatttttgaatgaaattatgctcaatattattttattatacattgtatatatatttcccttcaaaaacatatgtgattttggatttaaagttgtctgcttttagtaaaacactcacgctggataaatatttattacattagaataaaaactgtatattatactggttctgttattgttcttattattgttttcttcatgatctcctacatgttatttcaacccaagagaatttatctttcatttctaatcagatagacatttggctctgtactcatctccccatcactttgggccaccaaatataagattacttataagaaaatgtataaatgttaaaatttaagaatatatgtgtatttaaatttttattggtggaaaggacaccaaaatatttaaacttatattttctagtaagctagttcccatttctccttaaagtcaacagccatatcaaaaaatgcatttttttaggaaatcagaaaacaaatacaagtggtatattctgatgtaatttaggagcttccagagctgatgaaatcaggcaataactacaggtgagaaagtgcaaataagtattttagagtcttgggaaacccaggaatggtatcagatacaagggcactttgttcttctttaaatggatgggtatgggaactgagatgagcaatgctggtgaggggaagaaacaacagcaaccaagagctttctgaacttgattttgttcagaaaaacagagtaggtgaaactactcaagtaatccagtacaaataagccatatttgcaagtagtgtcctatccctgtggcagcaagaaaggagagaactctgtccctcaccataaccacctctgcaggaacatcctgcaaataaccaattaagcaaagttagctcattacatgatgagtaataagatattctcatggcattaaaagaaaaatactacagaaaatttatggaaaagaggcaattaatttaccaagagataagcatactttccaaaaaaaattgcaatggaacataaagaaaataacaaaacattttgaattttatttaaaagaagaaaacttaatcttgtattaccatgagtgttttgaaaaccataaagcataagcctcagaacaaaataagaaaaaataggaaatagaaagtgagttgacaaaatataaaagaagatgtgcgttcaaacaacataatcactaaaataaagacacaatgggaggagcataagaatgaataaagatagcaaagccctgtagaggacatctgatatggaaaggaggaaaatgaaaaaaaaaataaaaagaagatacagataaaagtaaagaatagggagagaaaataataaccaaaggaaacaatcaaagcagattcaacatatgcataattggagtacttcaggaggattctgcactgcactggaacagaatatgtatttgaaactataatacaaaaaatatttttgtgtgaaatgaaatgtttgaaattgtactttgaaaagacttgccctgggatgctttagacagaaatatcctaggaaaacttttgtattttacaaaataaaacttccttggacatatagggaaaatgatcaagtcatactgaagagaaaatattagactggctttacactcctcacagcatcattctgtaacagaaaacactgaaaccaaacttacaagatatttagagaaataaagtgtgagccaagtatttgatattcagctaagattttcttcaaatatagaatctacaagtaatttctcagaactcaggaaagattgttttttggagactgttcttggtgaaactgttagagaaaaactttagtaagattggggctcaaaattattgtacacagatcaacagcttttatatatgcaaacagtaacccatcagaagatgtagtaaggaaagaccatatttataagaacaacaaaagttaaattattttgttataaacctaacatatcattaagcctcatgaattaaaataatatagcattagatcatgaaaacatatattaacagaacagattaaaaaaacagaaacagacacaaatgcatacagagatttagaatatttaaaaagtagcatttgaaatcagtgtagaaaagacaagttatttcttacatggcattgatataactgggatatcctctgtaatggagttggatccattcactaagataaaataatatatttcacaaaaaaggaaattaaaatgacttctaaacttttgaagagatgctcaacttcacacataataaaagaagtgtaactcaacactccctgacctaccattttatctatcacactgacaaattgttgacgagggtacaaggaaatagacactcctatacaattattatataaaaccatcaattccacctcttggaaattacatacatgaaacaatgtgtctaaaagcttattaactgcactactgtttataatagcaaagtaatggaaacaacctaaatgtccatcaagaaaaactaggtagtaactgataaataagttacagcgtattcatgcaatagaatactgtaagttttaaaaatattaaagatctttaaatactgatggggaaatatctctaagatggaacagtactgggaagaaagttgatgtaaaaccatatatattataatttgcataaaaaagtaaaatttttcttgtgtatgcattaaaaaattatagacacaaggctacccaagaaaacttaagatagaggagacaacagtgaagggtcacttttcatggtgtatatttttatatcttatctttgcatatgtgaatatattaattattccagaatgtatgtgtgaaatatttgacattaaaaacatgtaaaattggccaggtgcggtggctcatgcctgtaatcccagcactttgggaggctgaggtgggcagatcatgaggtcaggagtttgagaccagcctggccaatgtggtgataccctgtttctactaaaaatacaaaaaaaaaaaacaaaaacaaaaaacaaaaaacaagctagctgtgtgtggtggtgctcgcctggagtcccagctacttgggaggctgaggcaggagaatctctggaatccaagaggcggaggttgcagtgagccaagattgtgacactgcacttcagacagggcaatagatggagactctgtctcaaaacaaacaaacaaacaaaaatggaaaattcactttataatgtattaccatctgatgtatatactcaaattatttgcaacatatagttacctgaaaccaagggtcagaaagcgatggcaagaatttttaacatgatcttttggtagatatataaaattacagttttatttttattaatcattggagattgaaaagcttgaaattttcttttccaagttcccccatatacagacatagcattcaatacagatgttttctgtggttctcagtagaagacttctgtgtagaaaaccattgcagtgagctcaaataaaggatgattctttttttttcagattttaaaaatacaattttcttttttttattatactttaagttctaggttgcatgtgcagaacgtgcaggtttgttacataggtacacacgtgccatggtggtttgctgaacccatcaatccctcatctacattaggtatttctcctaatgctatccctcccctagccccccaacccctgacaggccctggtgtgtgatgttcccctccctgcgtccatgtgttctcattgttcaactcccacttatgagtgagaacatgcagtgttcggttttctgttactgtgttagtttgctgagaatgatggtttccagcttcatccatgtccctgcaaaggacatgaactcatccttttttatggctgcatagtattccatggtgtatatgtgccacattttctttatccagtctatcattgatggccatttgggttggtttcaagtctttgctattgtaaacagtgccacaataaatatacatgtgcatgtgtctatagtagaatgatttatcatcctttgggtatatacccagtaatgggattgctgggtcaaatggtatttccagttcttgatacttgaggaattgtcacactgtcatccacaatggttgaactaatttacattcccaccaacagtgtaaaagtgttcctatttctccacatcctctccagaatctgttgtttcctgactttttaatgattgccattctaactggcatgagatagtatctcattgtgattttgatttatattactgtaatgaccagggatgatgagctttttttcatatgcttgttagccacataaatgtcttcttttgagaagtgtctgttcttatcctttgcccactttttgatggggttgtttgcttatttcttataaatttgtttaagttccttgtagtttctggatattagccctttgtcagatggatagattacaaaaaaattctcctattctgtaggtcacctgttcattggtgatagtttcttttgctgtgcagaagttctttagtttaattagatcccatttgtcaattttgggttttgttgccattgcttttggtgttttagtcatgaagtctttgtccatgcctatgtcctgaatggtattgcctaggttttcttctagggtttttatggttttagattttatatttcggtctttaatccatcttttaaatttaatgtaacttaatttaatttaatttaatttaatttaattttattattattatacttcaagttttagggtacatgtgcacaatgtgcaggttagttacatatgtatacatgtgccatgctggtgtgctgcagccattaactcgtcatttagcattaggtatatctcctaaagctatccctcccccctccccccaccccacaacagtccccagagtgtgatgttccccttcctgtgtccatgtgttctcattgttcaattcccacctatgagtgagaacatgcggtgtttggttttttgttcttgcgatagtttactgagaatgatgatttccatcttgagctaatttttgtaaaaggtgtaaggaaggaatccagtttcagttttctgcatatggctagccagttttcccaacaacatttattaaataaggaatcctttccccatttcttgtttttgtcaggtttgtcaaagatcagatggttgtagatgtgtggcattatttctgaggcctctgttctgttccattggtctatatatctgtgttggtaccagtaccatgctgttttggttactgtagccctgtagtatagtttgaagtcaggtagcatgatgcctccagctttgttcttcatgcttaatgttttcttggctatacttactcttttttagttccatatgaaatttaacaatttttttttctatgaagaaagtcaatggtagcttgatgaggatcgcactgaatctgtaaactttgggctctatggccattttcaccatattgattcttcctctccatgagcatggaatgtttttccatttgattgtgtcctctcatttccttgagcagtggtttatagttctccttgaggaggtccttcacaccccttgtaatttgtattcctaggtattttattctctttgtagcagttgtgaatgagagttcactcatgatttgtctcttggtttgtctgttattggtgtataagaatgcttgtgatttttgcacattgatttttgtatcctgagactttgctgaatttgcttatcagcttaaggagattttgggctgagacgatggggttttctaaatatacaatcatgtcatctgcaaacagggacaatttgacttcctcttttcctaattgaataccctttatttctttctcttgcctgattgccctggccagaacttccaatactgtgttgaataggagtggtgagagagggcatccttgtcttctactggttttcaaagggaatggttccagcttttgcccattcagtgtgatattgactgtaggtttatcataaactgctcttattattttgagatacgttccatcaatacctaggttattgagagtttttagcatgaagtggtgttgaattttatcgaaagccctttctgcatctattgagataatcatgtggctttttgtcattggttctgtttatgtgatggattatgtaggaaatgaaagcggaactggaaaatatcaggagtagaagtaaaatctttctttatttggtggttagaaagtcttttatatctgatctgtcactttttgtttcttctatctccatccccttcctttcctctgcacctttatatgtgctcattatatatgtctccaaaagaagttctcagtcctgtactttgcaccagatttcagccaaattgcccactacgcactgtgtacaatatctgggtggatttgtcagaaatcaggaactagattaggcgttcatcccccatctaatcaactgtgtataaagaaatgatcatttggtatgttcccccatgcaagcctgaggacagtctcagcagtgccatatagcttttacactccatccatgtgccagacaggtagtcatatccttcatctaagaaaaactgggagcctatggctcccttttcaaattgaagaggaaaagtttatgctagaagaattttatgctagaaggcccacccattaaaatcatagcaggcaagaataaacaaattacttatactaaatgtcatatcttggtgcctcaagcaacagggccaagtatgagtcatgcttttcttctatcactgttttggcctctgtgacttttctattgaagtgaccattttttttcacccaggggaaatttttatgagggaccacttgtgtaaaggggcaggaacttcatggcagtagcagttgtggaaaactcaggctctgtcccaccttttgcccatctttcagggaaagccctcaagcctgttaattcatggtgtggttacataacttacaattacagactctaataatctaacagaaagtaaataaattgccgggcacagtggctcacacctataatcccagcactgtgggaggcttcagtgggaggatcacctcaagtcaggagtttgagaccagcctgaccaacatggtgaaaccccacctctactaaaaatacaaaaattagctggtcatggtagcaagtgcctctaatcccagttacgcaggaggctgaggcaggagaactgcttgaacctgggaggcggagtttgcagtgagctgagatggtgccattgcactccagcctgagagagagactccgtcaaaaataaaaaataaataaaaataaaagaaaataaaagaaatttgtaagtaaaaatgcttctacaagaagctggaagcaataataaaaaaaaatcttaaatgcaacaattggatttggaaaatgccattttcttagaagttttttcttaaaaacaaatcgaagaatttgtaccctttaaatctgtaagtcactacgtaacttgacttcattagtatgtatttaaacattttaatgagttgtcagttatatatgaagactagacagatagattttctgatgtctgattaactttgggttgcttttgttttgaaaattaacttcatatttgtgatatggcaaaaacaccatttctgccccattgtttcagttaagttgagtagaataaaggccagctttcacaagattgttaatcagtgtcactcagaaaccatgttgtcttgaataggcatgttctgcgtcatctgttcatacacatgcgtttgaggatctaatttgaccatgtattttaaaaaaattggtattaaagcctccatagtagtttcttgaattaacaatgagataattggaatcaatgttttatctgaaaatcttatttctttgtttacctaccaattatatgaaattaagttcacatacacacacccttataacgctgaaggacccagcttcatagactatttataagattggggtcttgtttttaatgagaccattgattatttgatatagcacatcaccttaattatcactaggaaggagatttttaaaaacctctagtaaattaaactcttatttatacttttaaaaatgcatagtgcttacattttttttccaaaatttatataagtaagaaaaatataagatgaaggaaagcaactgaaaatacacacacaaaataacagttaatagtgaatagagtacaataatttttttcagtgtctgagccatggagcggtagaaaacaaaaggtaatagaatattatttttaatttagtacacacacatattttgtaataatggcattatcaataacagtaagcaatagaatttattaactgtttacatatatataccaatcatctataatgtatttttaagtcattattgcaatcctgagaatagtcttatttctgttttgtatatagagacaccaagattatttaaaactgtgtgccttacagttagcaaatgggtagtgctggttgaatgcaacccagtgtctgtatatcttctgcctcatcaactgcctacaaagaagatttgccttactacactgctgatgggtaacaatgcaggactgttctgtggctaaaaatatgtttttaaagcttcaaaaatatatattgaaaccgttatgataccatctccaaatgatatggtttggatgtttatcccatccaaatcttatgttgaaatgtggtcctcattgttagagttggggcttagtgggaggtgtttgaatcatgggactagatccctcatgaatagcttggcattgtccttgcattgagtgagttctcaccctgtaagttcacatgagacctggtttttaagaagagcccgacacttcctcctttctctcttgctctctctctcaccgtgtgacataccagctccccctcccttctgccacgattgtaagtctactgaggcctcactagaagccaaacagatatgagtgccatgttagtacagcctgcattggcaaataaacttcttttctttataaattacacagtctcaggtactcctttatagcaatgcaaaatggactaagtcatccaatatgaagattttctctcactcaataccaggagctttcaacttaattcttgaattttcataatggcttagtctatatgatcaataataaagagttggtaagcttgttgatggccattaatttagaaagtagcttctcctaggtgacataatgatttgccacaagtacccacatgtgcaaaaacatctgtgtcttattctgtcaggcatggcttcccagggcatagttctctgtggaaataaatgagagcataacttcaggggatgtgccaatgtacatatgtctgtgtgcctctcttgaccaaatcctggtatgctgagctgacagtgagggtttttaccctcactgtatgtacattttgaaaatgttatgcatgtgattctcatctgtaaaaccttctgccttccagatgaaaacttgttctcttccttggtctcaacaaattggaaacacaagttctagacttgtcaaggccaaggaagagagcaagttttatgagaacaccattaatatttaatgttacatgagatacagtacatgtgcttagagtgaacaccaagggctcatcaggcaaattcagagaaatgatgctgggcacaacgtattgcatttagcgcacccttcaagcaaaagagaccttgtcaacaaaaggtcttggtttatctgttctctattccatcctttcagaatgatccttagtatagatttgcacaaaatccatcagtaaggttagtattttcctgaaatattttaaaggaattggaaaagagatgtatagtaaagtaataaaaatattaattagaaagcagagtaggcatcactgttcttaaaatattcgttggctatcacacttgttcccttcgtgaaattacatctcacctatttcctttgttgtcttctttctgccctttctcttttctcacttctttcttgtttgtcttggagcaaaataatatatatgtctcctggtctaaggcaaagctctttagtcctttgcctggttttctgggtgcttgccaaccttagggtattttgtgttgttgagggggggaaaacttttcctgtactctcttatgttcagtgtctggggggtctataaaataaactgccaaaagatattatcagaaggaaaaaaggtttattcatatgcataaaggagctaacaaaagaagtaggtagctggataaatggttaaagttaaagcctaatatacccaacttagtaggggagtgggggaaggcttctatgggaataacaagtaggtttctttaggaaagacaaattggttttgaggagaacaaatgggagataaagtttgtgataatgttcatttatgaggtgtgtgtggtttttccttcttcttcatgccatgaaactctcctgaagagaggatttatggtagctgtactcttagtcttcttcctgggagtagaagccacccagaagatggaatttatggcagcctcatttcccagaagtttctgcttttagtcaaattgggaaagctccaacaatgtttttttctgcattggttgaatctcaaataccttcaatttaatttcttataccaactctggggacctgagtgggttcccacacagtgaatcaaggtccctggcattttgcaacattgtatgcctgccatccatgctcacaggatttcttactgaccctgggtaggtttgtcaaggcatttcatgggagagacaatgccctcattcactgagtgaacttctcatttctagtgttaagataatatgaataagaacttttcacttgttacagagattaaagaattcagacattactggggaagcattcaagactcttcggtagaaaataacattgtaaagctgtgttgatctcagagaagtggggaagcaaaagtttgttattaatgatgattttaaataataattataaaaatgataattcacatattatatgtcttcatttgcccatgtcctctttcatataaaaatggcaaatgcaagtaatcctaaaagtgttcttgtcaggcactaagaaacataaataaatcatacttaattttgcacaattctatttggtggatttttatctatattttatttataaagatcatgaaattggaaaggtcgggtgacttgcccagggtaacacagctgtaagcggtaggactcagatgtgatgattgtaatctaggagtaagaaatagagacctagagaaaggtggggccagttgaaatggaaatgaaagtgggaaaaagggatgaaataggatcaacagtatgacttcattaattggtattattactttgatattattacttggatgattgacttagtaactactatatgcttggagtgagagatgggaatgaagccaaaaatgatgctaagtgagcctggcttagtgatttttttttaatagaaattatgagggactatggctgggtgcagtggctcatgcctgtaatcccagcactttgggaggccaaggtgggtggatagcttgagtccaggagttcgagaccagcctgagcaatatggcgaaaccccatctctacaataaaatacaaaacttagctgggcatggtgatgcatgcctatagtcccaggtactggggaggctgaggtgggaagattgcttgggcctaggaactcaaggctgcagtgagccgtgatcacaccactgcattccagccagggcaacagagtaagatcctgtctcaaaaacaaagaagcaaacaaataaaaacaattatgaggaacagaaaaatatctagtttttgggacgggacaatttcttcaactttagacataatgagttgagttaatgagaatgtcagtatctttccttttaaattgtttgacattaatttttgaatacactctacatgtacaatatagacactgaggatagttgaataattttagcagacgtattccctgcccttgaagaattccatgctagttgattaagaaatgcatccatgtatttaatagctagagaataatttcagtgcaatttgtaagtaaattcattatttaggcaagaaccacactggtggtcttaaactgtgggtgccaattacatcgttaacacataatcccatggcggagccactgagggagaagtaggcagtacattcctctcccatcccaagaactgcaccctggccacccctagctcttggtatgtagacacgtcactctagggatggaacactaaggaatagactgtgcctcacaaaggccctggaaacaggttcagccttttgggaatggaattcccacaattaaatgggaggaaggaaggtgcgggcttgaggtgggcatatatatcggtccctacataattccttatcctaaggtacagccaaagaagagcagtgtcctctatggtcagtgccttttaaactctggagccaaggatcaagctagcctgggcctgaggcagtgccactccagcgtttctcttcagaggcatcactctcaatggcacctctgtgtctcctcactgttttcaacactccatttaagtaaacagaacatggactgaacacattttttttctccctggttatttgcattttaagccctttatctctagctatagattgaaaggctttgtctctagttaaaggaatttcaagcaattgcaactagatggataagattagatttggtcctgaggggcttctctttgtccctaaaactcctgatattgtcagttttactatatccagacagtgaataggctttgttctgatgctattctatatgccttgcagaaacgtgtatgcctactgtggccaccagtgtcaaatactgcacaatgctcacctacaattttttcaaatagtgtttctctttctattttattctttggtgcttataagacatctgttgttatattttgtatcttccacctacttattcatggctttttcctctaccttgtggatgaatttcttggtatcatcactaattactgctttgacatcttcagagtaagaattatctttttagttatttttattttgatgattatatatgttttctattgttatgtattagttattttcttcaaatctgttgttttatatttaattatttttctttttgtgtcataaattgatgcttcattttgataaaagccagtgtgtcagtttccattttaagcattgacatacttatttcaaagtttttgttggtgttccttaaaattaatttaaattctgtgaattcatgattcacttattgacttacttggtttttgttcttagcattagaatcttttacaggatttgagtttgggttttcaggcttatttttaataggaatttgtaaattcatgttggctttactttcttctctctcctcatctataaactgtccttcctatttagtggtttagcagtttcttcacctgttccttcaggactctagttcttatcaggtcttcaatgagaatctactgcaaaatattctactttggcataaggatgattttcgagctgaagcccagttgagaagcagaagatgcaggaagagttatcttctttccccttatctgtctaaaagcagggcataaattttcctttgtgaaggctctccctccctagcctggcaccaagaaaggaagaacaactcttatcactgcaaatggggagtcaacgctgaaacgagtttgcacgaataaaccttactaatataacccgactattccattaattcccccatatattgtctagccacttccccatgagttaatcatcccttgaagcctaatgcccccttttaaaaggcatataagcccctgaatctaaccacttgaatttcacttgttttctgtgaattcctatccatgtaaatattaataaaaattttagaccttttctcttacctagcttttgttagtttaatttgcaggcccccttgacagaacctatgaggatacaagaaaagttttttggttttttttcccaacatcttaataatgtgttgtggggcttcttcccacagtgatgtctaaaatcgttgatgatttggtttgattaatagtgaagaggctgtgtctatgccctcccactctctctaggttcccattttaaaataaagtcaaaattgcagtcagtgtgttggcaacagttttggccacttatctttggcagcttaatactaccctaggcccaggctttcagggaaaacctggttctagatccccatgacgcttttagttccctttacattataggggccttaagattgcttgctactttatatttctgtctcatttcgtggtccaaaataatctttatctcatatttgaccctaagtctttttctttcttattgaatataacttattgttgtcatatcctatcttgacccaaaattcttataaacatggtttacttcacattttaggttcacctttcaggtctctcaaatattatttttttggcttttaatcaatagcatgtgattagcaggaaaactaaagaaagccatgtggcctgggcaaatttgatacagtttgaaaagtatgccccattttttttgtgctaagattacgtgtgtttctgaaacttggagagaagccagggacattttatttagtaatgtgaatgttggctctatctttaggctctaaagaccaatctaagattgaccagcaattgtaaaaatgttgagtgatctaaaacaattttgtctaattttcgtcttttaaaaaacccatcttttagtctttttatctgaggatagtttatacaaatgaaggtagtgacacctgtaaatatattaaaaatcctgagaccattgttttaactgaggtccttgttgaccatttcaataaggaaatggttgcttatttgcacaacatttcaatcagttgaacttggggaagtcagaagtaagattggggtcattatttggcttaaaacttttccaatgagagtcaaaatatcattgatgaatagcaatgtacatgtatgattaatattccaagacagattttgtaaatgtattgtgtgtcttaaaatatttgttactctcattcatgtccaggtttcagcaagtttagaagtacatttgtatatcagtagtagtatgactaattatctctacatgtatttatcattaaataaacctcacaggagacagaaagattgtttacttaagcagtagaatactggggatggtagatagctctagaacacaggattacatcgctggaatggcactatttattaagctatgataacgctaatgttcctctttgatgtatagcatgtgcgacttcagctgaacttgtagagagccttaaggatgtttcattgaacatttagtatggcagccagccagaatacatttagcctaagcccagatgacgggctggtaatgaggtagtgattgatgaccacagcttccttatgaaaacctgcttgatatgctggggggaaaatgcattgccagctcttttcatttcagtccctgttatattagtaatttttactgtgaagaagttacatgggcttctgcttatgcacttttggcatcccttttagattacaatcgaacggtggtatagaattttagaagtcctgtggctatatttatgtataattcaaatctcaatttcaaaggggtctttaaaaatcatttttaaaaactataactgtgtcatccataaaatactctaatattatttttatgcatctgtttaatgttatggtttctctgactcctctatcccccatatccccacacagtgtcataaagctctacccactcccgtaactttaaagaacagacatttgttcaaattcctaaatatgtttcaagaagactctattttcaattattcttacatttttgtggtatgtatgtgtgtcttttcctgagtaaagcatataaaattaattcatatatatttttatatatgaaattcctctggcttagttcctttgaagcactttttctcttttgtccatctcttttttgctttatacatttgctctcttactcttttgtcaacataaatcatttctcagattgggttcacataagcacttatgattgcaaaatgctacttgctagaatgaccactttggttgcctactgacctgggacaaggtagagcaaggcccaagattgacatttcacccttaataagtcttgctcgttgaaacgccaacaacaaatagggtttgctgagattgacaagagaaaataaactatgctttaagccagcctgattgtggctggctgggctttcaattttgctagtcagagagagtctgtacccttttatgccttgcagccatcactccttttggcttgcagtggccaaacagaatgcttgaaactcctgatctcaatccagtcactggggcagctcagacaatgacagtttgaagtgactggaaatcctgttgagacgccatagcccacatttggcgtggttccagcaaatgaaaatcagtaagcttgctctcagaagcctgttacgtgcttatgtttttgttgtttcaactacctccatttcttcaattatttaagttattagaggacctggaatgaaacaaatcaagacaaaggagtattagtatccttttgaggtttggcttatctctcaaagcttttgataatacttcctattgatgggctttgtaaagggcaggaagttgtgttaccactataattctttactttgctccctatcaaaaaatagtagcaaaataagagttgtaccaaagtggaaggcttatcccttcctattatagaacttatcttttattaataagttgctcaccactattaccacaaaaccatactttcttactggagataaagaaacttgttatttactgggaaaagtttctggtagcaaaacttgacctgaaatgaattatttacaagtttagaagaaagacttgctaagtcaatgctacagctgagaaataagccaacactttctccaaaacagcttgaagctgacaaaacactaagctctgaggtcctagagaagcagcagttcagggtcttgttagcttcgagctgcaggaaagacaacactggcagagtgctcagaggaaggagcaggcaccccaagagggggatgtggagggagctagaaacagcattagagagaaggcatggagaaatagagcaacaccaaattaaacactgagagatgatgaggcacataaagtacttaaaggagttttggaggtaaaaacaaaacaaaagtaactggttaggaaaatgggaaatgaaataaaacaaattgcacagaaaactttagggcaaaatataaaaaatgtccaatgtaagaataatacatttgtattatatttatatagtgctttatatttcttttttttttgactgtatatagtggctttatccgtaatagccaaaaactataaacagcatagacgttcttcactgactaatggttaaacaaactgtcataatatatatcatattagtactagttagcattaaaaaggaacaaattattgatatacgtgacaacttagatgattatccagacaataagactgagtggaaaaatctgattctaaaaggttacatactttatgattctatttatacaatgttttgaaattatgatattttagaaatgggtaataggttagtggttatttgtattattttattcaattctcacagcccccagtataaatttcattacccccattacataggtgaataaaattaaaatgattgcatagatcatagcattgtctaaatcctaatttctaaaatccactcgtagaatttgctgaatatattgatatatggcaaagatttctagcattttatgcatttttgtttttgtttgtttttttttgtttttggagagacactattttaaataggattatcagaaatggcctgtctgtggagggacctttgagttaactgcaagaagtgagagtgtcagttatgttggctgtattctgataaaatatggctatatctaactaagtaagggggcaaaagagatgacaacattggaggaggatgtgttaaaagaactagtgcctctgtgagcagccttcaaacgatgaatgatgcccccttcatgcaccaactgcctgaccactggggtaggatagctttgaggtgtgtgtcctacattggctcctagaatttttagcatgactttttaacacatgctttattttgtttcctgtttcacttgcccaccctcctattggtgtttcctgggattatctcccaaataaatacttccacttgatttcttgactcaggctctgcttctggaagaacccaagctaagagagtggtaacaatgtaagtggtaagaattcatcagaatccgcatgccatttagaagtgagaccgataggatttactgatagattagatatggggtaggaggaaaacagaaaatcaaataaatgacttatttttaatgttaatcattaaaaggagccataaaaacatccaacttgtgtgattgtttactaattgccagggactcacctagtcctgctgcacatgttaaatcatatgagttatccctaaagccccatcattatgagtctgggttcttttatttagcatgtagaggctgggatttgaactcaaggtatctagttctaaagtctgagcaaataaccactgtcctcttttgcacagatagtacataggctataaaacagcatggtcatacattcatatttacatacatatatacatgcatattactagtacgtagtacattcgtatttactaattctatttgcatataatgaagaggtggtgctgaatttttcttctagccactttttttttgcatgtatgcatatataaagtattttgtaagtctaagttggacttggctatcatttcaaaaatcatgacccttctcataaaaattaagaggtaatattactatcattattattattggcaagatttctaagttgtactgaattttctataatcaactgttatttgatagaattgtttgaaaatattactacatgcttgatggcaggacctaaaacagcaggcaaaatatatatgatgccaaaggcatcttctcttatcactagctgatttacaaatgataatttaactgttaatgtctgagaatattttctctttcccatacacaataagaaaaatcactgtgtatactgagtggtgtctaggaatgtgatacgtattattcaaagtttgagttgccttgaaatcaaggtatagggaggaatgatgaggacacatgggaagaatttagaaataggtccttacagcaaaaagtccatctggtccctagaatatagatggagggtattggagagcctgggcaatagaattaatagagctaggaaacaagtacttatcagaggaggatttggtccatgaaagtggtcaagatttggaagaccctttccctttcccccaacatccaggcagttttcatatcatgaagagtctgtgcctcaatgtctctgaaataggaacctgccctttcattcctactatcattatctttgtccatgcaattgtctttttgctagcagatagttacaactcactttcaaactggtctttttaaggatagcatctaaagtctttagcatggctcaaaaggccctttataattttgccttcctgaacctaatagtattataatgttattttttgtatatgtatatgtgttttatataatattaatatataatactattagtaatgttatatcagatgataatctgctaatgatgttcaactcctctaggtcatctaggctggataaatgtttcaagatagaatacttggagagaagagagttggtgttatttagagcagtattttctattaaaagcaaggtggaaattgaggaattttacaagttgctagccctatggcagatgatagcataagtgggtaagataaaggcatcctaatacagtgtcttgttctttgttaacaagaaatgaaaaagaagcatacattttttggttcttagaaaacctggggaattgcagagcaggagggtgatatagggaaaatacctgaaacagagtgagttgccacaggctggcttcctcgtgctctcagtgcacaatggaacactggggattaggcggtagcatcagttcttacttggaagagataattgaaaacttttctgtttctagaaataatgtttcttaaattattgttggtaatatttacatataaaatgacattaatcctggaggcaatatgttgtaagttaaattatgtaggatttgaatccaaatcctggatctgcatctcagcagatgttttaccttgtgttatggactgtttatgtctccctaaatgtgtatgttgaaatcccaacccttgttgtaatggtattaggaggtggggtctttgggaagtgatgaggacctgagagtggagccctcatgaactggattagtgccctcataaaaggagcctcaaggagctgggcctgaagaggccctgcaccagatccagacatgctgacacactgatctgagatttccagctcctagaactatgagacatgagtttctgctgtttataagtcacgcagtctatggcactttgacatagaagccggaactaagacaccatggaaaggtatttcagtctatttaagctctagttagttcccttgtggaaaaaaaagaaagaaagactactaatatattttactgagatgctttgggaatttaagtcactgagaaaatacttagcatgtaatatgtatttcagaaattaaagttcccctccattctctttccttactatgtcgtttatttttataatggtcaggctaatgcggaaggaagacatactaagactttatctttcccacctatgataatcaggcaaataataactgatattgatttaacattgttttagaagaccaatgtttgtgaaatgtatatatcacattcagaaactatagatgggagtagaaacttgaggcaaaatgtgaaccaattttcagttaggcagaggagcttgcctccttttggaggaaatgggaagtcattgtatgtttttttatgttgttgtttgtttgtttttttcttgtctttgtagtaaacagtcgtagtcattggaaatatttacttccaatttaaattgagaataaaatcttctaaaaaagaaatagttgaagtaactgaatatttatatgaattttctgtttatattaatgattttctcatttatgttaatatcattgacatttcagaatagttgcaacttagattagagcttaagacatttttttcccattgatttagcaaacattaatgaaacgctgacaaaatgcaagagactctggacttggcaccgtgggaaatacgagtttattcatttaacaaatagttaagtatttaatgctgtatttcaggcatcacggatagagtgaacaattaagaaagaagtggtctctgacctcactttgcccatagtctagtaggtccaagaggacaagctttcctacccttgatatttgaaatgacccgaaaagaacaattatttatttgtattgacagattcatcatctgccaaagcccacgtgaccttttctttcatttgtccagtctatgtcagtgatgtcacaattattgtataaggttgcaaagcttcaaaaaataaaactgagtgttttatcatcgtattagattgccagggctgccataacaaagtatcacagacagggtggcttaaaacagaaatttattttctcacagttctggaggcaggaagtctgagttcacggtggcagcagagttggtttttcctctgaggtgtctctccttggcattgtagatgaccatctcctccctgtgtgtttacatgctgtcacctctgtatatgcctatgtcctaatttcctcctgtttttagggcaccagtcatgttgaattagggcccactctaactaatgaccataattttaattctttctttgaagatcttatctccaaatacagatgcattgtcaggtatttggagttaggacttcagcatatcaatttgaggggatactactcagttcacaacagttacccattgatatatcatctatagtcattctgtcatcattttacatccagttattctattgcctctgatactactctaatccagatgcttataaacaacagtgttttcttttaaaggcagactcttgttcagaaattcttcttacatgtaatccttccaattagaattatttctcaatagttcttttcttgatttataaaagtttattataaattgacagttataattgtatacatttatgaggcataagatgatgttataatattgcaaatagtatgtggtacaattaaatcaagctagttaacatccccatcacctcaaatcttaacttttttgtggtaagaacatatgaacttaatatcttaggaattttgaaatgtacagtattctgttattaactatattcactgtgctgtgcagtataactcaaaaaaaagaaaaaagcacacacttatggtctgagattttaccctttgaccatcatcaccccattccccaacacacaagctctgtaaccaccattctcctctttgcatctatgagtttaattgtttcagattcgacatccaagtgagaacatgcagtacttgtatttctatgcttgacttgtttcacttagtgtaatgttctccaattccacccatgttgttacaaataataaaatttcccttttttaagtccgaatagtatttcatactgtatatatacattttctttatccatttatctgttgatagatacttagtttgattctaaagtttagctattgtgaatagtgctgtaataaacatgggggtgcagacatgtcttcaacaaactgatttcaaatcttttgggtaaatacccagaagtgggatttctggatcacatggtaattgtatttccagtttttcgaggaactgcctttctgctttctatagtggctctactaatttacattctcactaacaagagtgttttcttttctccacatccttgctaacacttgttatctttcatctttttaataaaagttattctgacaggtttgagatgatatttcattgttttaatttgtatttccctagtgattagtgatattgaggataattttcatatattctaggccatttgtatgtcatcttttgagaaatgtctatttagatcccttgcccatttttaattgggatttttgttttactgctgttgagtttagtttcttaagtattttggatattaactccttatctgaggtacagctttcaaatattttctcttgatctgtaagttgtctctacacactgttaattgcttccttggtaatgcagaagtcttttagtttgatcaaatcccatttctctatttttgcttttgttgcctgtgcttttgggatcaaatccaaaacatcatttcccagaccaatgtcatgtagcttttctcctatcctttcttctggcaattttagagtttctggttttatgtttcagtatttagtacattttgagttggttttttatatggtgcaaggtcaaattttgttcttctacatgtggaaatccagttttcccaatagtacttttcaatgagactatcctttacccattgcttattcttggcacctttgtcaaaaatcagttgatcatatatgcatgggtttatttctggatgctctactctgttcccttggttgatgtgtctatttttttttggcgaatacctttctgttttaattactctagctttgttgtatagtttgaaatcaggtaatgtgatacctccagttttgttctttttgctcatgattgcattggctattcagggtttttcaatggttccatatgtgttttggtaatgttttctctatttctatgaaaattaaagttggaattttcatggggattgcactgaacctgtagattccttttgtcagtagttattttcattatattatgactttgatccaaaccccctcattaaaatgtttctatcactatgcctgactccctgaggccttggtaacaattgaacactgtgttcccaaatttatttcctgttattctgcagtgaattatgtttgctgaagactgaacatcctttttactttccataagagaacatttaacagcctgctctagctttatgagtaagattatgtgttttctcctttgtggggaaattcatgaggaatctttactggcttgcctttgttattcagactgctttcttcatcttgcttttttgtgggggacacccctcagtttgcacctaattcttacctctctgcttcacagtctttggtcatgattcttgagagcattcctttgcttcttgagtcactggtcattgccaatatccttggactaactccattcactttcaacattgcccagcttgatggaaactagaatgaccagagtcctatctcatacccactttcttgagaagtggttttaaataatttttgcctgaagtctttgcatctgttttgcccttcagtatcatgatactcccttctcaacttcacatatgcaaatcttagctctcctgattctgtgtaaacgccattcttttcatgaaactatttcctgattccttcagatcttgtttgcctgcctttcttcttcactttcaccacactggaaactgcataaaataacatctaattatatacagtcttgtatagaaactcatacttcatgcaacttagtcttttattcctcggtatctttttaaataaacttttttattttagaacagttttagatttacagagttactttagagacaatacagaatcgctggagtccacattcagtttcctctcttgttagcaccttacattagtatagtatgtttttgttacaattaatgaaccagaattaatacgttattattaactaaggtccacacatttgctagatttccttagtttttacccagggtcggttttacctagagtctatccaagatcccaagttatatttagtggccatgtcttcttatgcttttttttggttgcaatggttttttcagactttccttatttttgatgaccttgacagctgtgaggattactagtcaagtatttttttagaatgttcctcaaatgacatttatatgtgttttttctcatgattaaactggggttatgggtttttgggcagaagaccacagaggtaaagggttatttaaatcaccttattttatatactatcaataagctttgtcatgattaatgttaaccttgatttcatgactaacatagtgtatgtcaggtttctccactaaaaaattactcttttatgactctttgcatatcatgttctttggaagaaagccactatgagcaggccacacctaatgagtggggaattatgctccacttccttgagaatagagtatctacataaatcatttgggattcatctgcatgggaatttgtctattctgcccatttatttattcagtcatttatttatataagtatgatggactcgtggatatttattttttactttttgctgtaaactaatatcactttgttttgttgctcaaattgttctggctgtgtccattgggagttcttttagtttactcctgtgtccctttaatatatctacatctgtgcgtgtgtatgtgtgtatgtgcatgcattagtgtgtgtttgtgttttagcacttaatttctggccctacaagatgatctaggcttatcttgtatatttccttcctaagtcctagaatcaggtgtttctccaagggggccctgatttcttttattggataatggtattagaaatcaagatctgggagctaagtgtgctcattgctactgtgatgttattgcttgttaggccctcccagctgatgggtaagggaatatatatgtgtatactaacctatgcatatacatgtatgtggacatcagtacaaaattagacttatattatttatgtacaaatatgttaattattagatagctgatttttgaataaaatgctaatacatacatatttctttaaccatatgtatctgtattaaatgaaacatgtgtatatactgatgtcttccactctaattcatcaccacgtagaccattgtagcctctctctatccttttcttcttatttacatttaacctcccaatacaacagtgaaaacacctgactcccataatctactatcagtttacttaattattcaattcttatttacattcattaaaattattaattcataccaccattccaattcattatgtttaaaatgatacaaaagtgccagatacttagcatgtttctgtactactgaaaggacctagaataaagatgaatttatagtaggtcctatatgctattgatgagtctccaaaatagttaatatactcaatcaaatctaaatttcttttgatattcaaaaggcattacagcctcttgcagtgctgacatggccatcattataaaattagacaggcttgtacagtatatgtacaaatatgctgattgttagatagctgagtttgaatgaaatgctaaacttttttatttcatgataaatctcttaagaggatgaaagcattatctaattatcgaattgttaaataaagctgtaatccatgtacaagtaggaagctgattttttaaattaaaaaatgattatcaaaatggaaccagaagttgctaaaagaatgattagataggggcagaagtatgaaggaaggctaagaagattggacttttacattttgggacagtgaagaatgaaagagcatatacgaatagaatttataaaattatgaacaatataaaaggtaaatgtggattcctgtccagatatccagaaattgtaatttatctgaaacttcactgaaataaattttggccaactatgtttaaaaagttaattttaagagggcagatggttaataacctatgagatgttgccagtaagaaatctaaatgtgagagtgggtgccttggctcacacttgtaatcctaacactttgggaagccaagcggggaggatcaattgaggccaggagtttgagaccagcctgagaaacatagggagacctttatctctacaaataaataaatatatagtggagtgtggtggcatgtgccgatagtcccacttaggagggaggctgaggctggaggattgcttaagctcaggaatttgaggttatagtgtgtgctacgatcatgccactgcactctaacctggtcaacaaagtgacactgtctcaaaaaaattttttttaaaaggacaaaaagaaaatgtaaatgccttcaaaatgggtatgggaacaccagtaaatggcagaacattaagatgaatgccctgtgtatcaattggaatagtgattgcagccaaatctcactggaatctgagtgtaacccaggctaataattccaaagtgcctatgttttttttttttttcacttatactgggagattttgccgaactttaaaattaaatgaaaaagaatggctaaaaacggttcttacagctttcagcttttttgtatttagaatcagtcatggcaatcacagatgtttgaatttgatttaacttcctcaaatctatttttcaacatgagaaaaagctgtcaaacagtataggcacaaatgccactggcaatactttaaggccttaagcccagaaaataatgttttcatattaaatatatccattttaaaaagttaccttcaaatttcctagaaactaagtgaaattagatagtttgtgtaatggtaaaatcacaaaagataccaagagcaaggaaaaaactaacatttttcaaagttataagaagcatgattacttgaatttttatgctagtcagtattataaaaatagaagcaatggtcgttaacattaactttgtaaccggtgtttcccttgcattgataaaagggtggatgcggatttaatataggcaatacatttgaaagaaaagcagattattccttcaggattctcatatgacattctgaacaattaagtacaaacgtatgcttaagtccaatttcatggaaagttgctaacttgttatctctatatattactacatgctaaagacaagcgaatcaaacagaacatggtattttgtcctgtcaaccagcattccattttgatcataagctagtagttgtcaggttgatataaataagatacttaaatataatttagtacaaattgtttaaagtagaaataatgttattaggcatctctagcaatcctaaaagaaaggaaaatattttatgattacctaattgatttgaaactaaacaattgactacacttttctagaatgtaagattttgtaaattttaccaatctgtatgaaataaaacaacaaaattttaccaaagtatataatccttataacaacctggttgtgtgatatattatccccatttacagtctggtggatatccacatcaaatagaaacaaaaatcataaaaaggaatgaagataaataaaaacatcttcaccaagattacttactgttactgcagaaatgagacacaagattgcatcctggatgtttctggtgcattattatttcttctatctacactgccttcgattttatgtggtgagctcaccaaaactccatattaagctatgggcaaggaaccccgtgcccttcattaatctgtgatggtggcttggttgaaactgttggttttgaagcctgattgcctggattaaaatcctacgtttatttctgaagtgtggctacctgaattcaaattctgtatcatctacctaaattcaaattctgtgtcatctatagcaatgctgctggttgtgtagccatagactggcgccggactctgaactggttattactggtctgtaatgagataagcccacacactgtatttagaaacttttatagaaacttgacagagtatacaaaaaaattaaccgggcatggtggcacatgcctgtaatcccagttgctcaagaggctgaggcaggagacttgcttgaacccgggaggcggaggttgcagtgaaccgagatcatgccactgcactccagcatgtgtgacagagccagactccatctagaaaaaaaaaaaaaaagaaaaaaaatccttgacagaataattacatgtctaatgaatcaagtaataaaatgtcaggacatgctatgcctgtgattttttttgtcaatttctgtttctagtaatttatttttgttttcttaaaaaataattgaaaaggattggaatgaaagaagactagtcccttgccatggagagtctgagaaacactgatctagaacagtactaaggcaaagctttaatgtccttatcattgaaatttgacaaaaagcaaggcagggcaatgatttttatacctttcaggtgacaacacttaaaggggtctactgtaccatataaaaattatttctctacatacttgcccatttggtttcttatatagttatcagacctacagcagatctgaccctggtatgacttacattttggggacccaagtggcaaactgagagagttttaaaagagaaggcagcttgagactttttccttcttttcataaaagtttctccttatttcgaggtgataactcatggtttaatagttcttaaactttaatgcgtgtaggaatcacctggagatgtgcatccatctctgactcagaggggtggagtctgagtttctgcatttctcacatggtgctgatgctgcagatgtgcagaccttgcttggtagcaatgatttgacaagtcttgtttcccaggtatgcactccacctagtgcctgtcagcagacacccccaacccctccacagcacctctctcagagatagaatctccctgcaaatattttgtaggtatccctagttcataggagatgttttatcctcaccctgaacttactctcaatgttggtgtttttcactggacctagagaccaccagaagccaaagatccagcaaagctaaagttctaagaattccaatgtaaatataattttatttaagccaaatagctttttaaattactaacttacaaatatgagtaggacaggctgactagtctgacacagccactgttgcttagtgttttgtaactcttgtaaaaatatatttgcctgaaatcagtagtccctagccaattacctttatttaggcatggatagttgagtgtttttgtatagacattttagaacagtcttgtggttctgataaagaacgtttggaggttgtagacacgaactgtgtgtttgtgtgtgtgtatgcgtaggtgtttgtatgtgtgttttcttcatacttatgccccatctgaatatgtgggaattagatccttggatcatttacaaaagaaagaaagagaattttcctagcagcttggactgcatgtgtgcaccaccatgcccagctaatttttgtatttttagtagggatgggttttcaccatgttggccaggatggtcttgcagtagaatcacttgaacccgggaggcggaggttgcagtgagctgagatcccaccactgcactccagcccggcaacagagggagactccgtctcaaaaaaaaagaaataaaactttcatagccttaattttaggagaaatcactactctaataatcttaggaattttaatgcaatagtgaaatattcattcttcaagttttctttttgtacataacataaacaattgaaattaaaaattataattgctgtgtttcatattgtacaagtcattcacctaggatatatatttcttcttttttgtatgaactaggtctctattttttgtgttatcacggttatctaagcacttaagtaatttgagctacatggttagagacggtttttaatatttgtgattcttgggtttataatattaatatgcttgcaaatcttggttttagtaaaacatccaagtagtttgcatgaataattaagtgaacaataggtaagtatccagcatctccgtgtggtctctctggtcttttaatgtaatcctatctgtctcaaaaagataatattttgaataagaattttattcttgacttggaataattttcaatctcattatcctaaattacattttgatccttggatatttaaaaagaaagggatgatttactcacttatgtgtggaacctttcttttatgatgctgagaaaagtgtgacaataaataaaaaatgaacaaatgaaaactgaatttaccattccttcattagactaacattaattgaatacctagtatgtcctaggcagaaagaatgccgagaagaacaaagcagaaactccgtaaagagttcccagacaaaaaaaaaaatcatttattagagtgcagtgtaaataccaataaaatagactcaaaccctgggtgtaaggataatgaagaggaggaacacatggtaggaatctgctatttctgtttggggtagggagtgacagtggtctgtcagtcttctcagaggagttaacgtatcatatgcttcataaggatcaaggtaaatggaagccaggcaaaggagggaaggaagggcatgccagtcagagggaatcttaactcaggggtaatgaaggggaatgttgtattcagtgcactataggacagaattcaaattggtttatcagaaatgaagtgtaattgctgaaggggttgggggagatgagactaaggttcaaataatgaagggccttatattccttgctaaggagtgaaacactggggagtccctcgaatttttcattttagaaaaacttatctgccagcatgatggggaatgataccaacagagaggaaagaagcaggaagatcagtttgggaggttatttttttgtcagccaggatagaaaagataagggcctaagcaatattagtgagactgaggagattaatttgaaagattattaagtgaaaagaataggatttggtgattgtagaaatgaagtttgatggagagggagttgtgtaggatggttctgtttgttacttggtaatctgcatagctggtatgtagtttgtacttaccaattattttgtcatgttttacatgaaggtcagaatcaccccactgttggtcagcatagattcccgacacccagcatagtgtctagctcatagtaagtgctctatgaatatattttgaatcaatgatcatctcatagttcaaaaagacagaaagtgtgaataatagaacatttggagaagaaaatgaagaatcgcattttggacatcttgaatttgttgtgttactagcccaaccagtggaagatgttcagtaagcagttggacaactggatatatgggtttatgaatttttatttttgtaaacaagaattgtgtcttactcatggttagagaccttagcagtgttatgcaagtttccaaatgtgtgctaactttaatcatagttagcactagtattcaaatagtattgcatagtttaagagtaagctagatcttttaggcatatatgaaaaactagatattgccctggattttaaaagcctacagtcttaaggaataaataaggcagagaaaagaggcggctttgattgtggaaagagcattgatttttgaattagaagatctgtaagccttaactttgctgttaactagattttagtcactaagaattgtaaaattttctagactgcagtttcctcagtgctaaaatgagacaatgatatttcatggtatccaatgtctcttcaacctgtaacattaaataatcctgtacattcatacttaaagattttaaaatacatattgaaaagtgtgcatcttgatgggtggggaggatgtatagttgatttatattagtgagtagtcgtgatgcttccctccattgctaatgaaaatgaagtggaacttagaattagctaactggatttaggcctcatctctgtgaataattagctataaaattttggacttgttaagccccttctaggggctaattgtccttgacatgccttttatctctagtctactatggttttattaaaagtatttatgtgtgattttatcctgtcaaacttgtgggggaaatcaactcagtcttataaatatcattcacataatatctattaaggcaacacttgatctactgaaaacacagagtaaaagtatttaaattattcatcagaaacattgatattaaactaattcttctagctcaagtctctaactcttgtagtaccttaacaccttacctatatctttataattattctttagtaaataaaatctcgggttatcctaatttaagtgtgacatttattttttgtagggattctgtttgatacaccctgtcataaaactttaaaaaatttttaataaactttgaagatttgcctcatttaaaaatattaattaagttttaaatcaccatatcccaataccatgtgtggaactacggtagctgctatataaaatttttcagttacttgaatatcaactcaatgagagaaattgctgagattacaagtaagatccatccctccccctggctcttcgtgagccagataattagataaaaggatgagctagtaaaggaaattcaaagactgttataatattgtatgtatgcacaaaggaaaataacatggtagaactgctacttttatgatctctgtagctactgccactatgacattatcctttctacttgtgcctttactaattattgatgtttgctaatacataatcatacccattgttgtctatttatcttatttctgtcatgtcctttgtgcctaaaaatctgtacattaggattcattttattacttaaacgctatattcatgctctagctctttccatttataattttaattagtaaatatatattgaacaaatgaacaaatttaaacacatattggcagatcatgcgttgaaaacaggtgtttcggaaagtctcaccagcacactcagtatgccccagatttctagatgtcgcatttaaggactttttgtgagtgaaaccacccaatagtttatgtaaaacagatgataaatatgaggatgcagaagagtaaaaaatttattaaagattttagtgacatgtccactctttttttctcatcattttcagagagttatgattgatttttatgagcacactgaacaaagagtgtgataaaggaaatattttccttaggaaagagggttcccagacttaaactcaattgactattaaccaccaaaattatcttttgactgtacaaatagactttacattcaattagtatatgatttaaacaaatttagataacttgcctagagaacaatgcctgttacaggaaggctgcttaataaatatttattgaaggaaggaaggaatcaagggaagggcagaaaaaaggaaagagagaaagggaaagagagagaaaagacatgtctgcccaacttggtttcaatatttttatgctactatttagcattttagggtagtaataaaaatgtgatggataacattcattctagattattcaaaactctataataatcagtaagaaaatttcaaaattagatataaactcttaatgaaaaaacatccatgtagtgttgtcctggccttgattatctcagtatttcagagaagcacatgctcatagaaaggaagcctcaggtaaatgacaactcttgctcagcactgggggcagcatagaggatgagggattgaagaaacaagcccaactgctatggtataatttgtcctgaggttttggaagacattttgcatataatcattaaagctaaaattaaagatatattaaagccaaaattaaagatattatttgctgcttaataaatgatatatgtcttataacttcattaaggatggtgccttccttaattgttgcatccatgagattttcagtgaggtgcatattaactgcagagataataatgtttctatatgttaataattttagatggcaaacacttaagctattttgcagccacatgggaggaatcatttacatctttaaaggcttgttttaccattaaccccttcatttgagtacagtggatagccatatgtaaagtattaatttttttttacattagtgctaatagcaagtattttagacccacttgtgtgaaaagattaaaagccacagcattaggcatgcaccaacatttctgagattaatccttgttagaccaccctaacaggaacatataacttgattttctatttattgatcagatgcctcctggttcttttatcgtgtgaaatgaaactccacagagacaatagtatattgcattaatatgctgaatttaaaaatgcaacaccatattaagttggtctattttgccctctctacttttaataccacttaatatcaatacagggcataaggggatctgtggaaataggatacatcctaaatatttgtcattatgtcccagattacacatgagccactcatgcatcttctagtcataaactaatgcttgaaggttatgttaacaataaagttatgagaatatttcctaacgcagtccttgcaacacggggagtgatgaatgtttatgaaagaatgaatgaatgaatcagaatacgttttactacaactaacacctgtgtagtaactattaagtaccacgagcactacttctaggtttgcttatattatctcatttaatcattacaaaaaatcctaatctcagtgctattaaggatcttattcttgttttgcagatgaaaaaatctgtagtaaaagatggtaagctaacttgctggaaagtagcagagtcaggactcaaacttaggttctggctcggatttgtctagcacagtacgtgatgcattgtgaatgtttgaaaactgctgtgatgatgtggaattggaaatgttatctgatgtatagaaaaagttatttaatactaattatagaattttcaaattgcagttgcatggattgcccctgtaacctcctagaacaccttatatttacttgattttcaacaataagatattttattttttctctctatagaaaaataagatttgtgcatttttgtataaactcactgatacggtttatcacccaaatgaaattctctgtccccacccaactctcatcttatagctcccataattcccatgtgttgtgggaggaacctggtgggaaatgattgaatcatgggggcaggtctttcctgtgttgttctcgtgatagtaaatgggtctcaccaaatctgatggttttaaaagcaagagtttctctgcacaggctctctttttgcctgctgccttccatgtaagatgtgacttgctcctccttgccttctggcatgattgtgaggccttcccagccacatggtactataagtccaataagtctctttcttttgtaaattgccctgtctcctgtatgtctttatcagcagtgtgaaaatggatgaatacatctattatcatatgtatgtttgtacatacgtacacagacacacacacacacatatatatatacacacacacaaacacaccgatatatagttacaaatagagatatgaaactaaaactggtaatgtctttcctctttctgacatcacggttactttgcattttaaagctccccagatgtatcaatgtacttggatatatgtattttgtaagcagctaatcatgatttgagcaaacaatgaattctttaattgcttaaaaataggattttcacatgaagaagttgggcaaaaaattgtaatctttatagagaaatctgaaatctgagatacaaaaatctgattccatctgaaatcatgtactgaaatcactatggagtctgtttctgtagttatttgatcatatgtccacgaagatagctttgctttttaacccatcgcgtacacagttttcagtatttagttctgtcaatagaggacctggaagcagtgagggtaaatgaggaggaatgatagtttagatgtgttctttcctgaaatgccagttgaattaaatctttcattcccactgcaaacatgcaaatctataatctcctttcaagatgaatccagaatcaggagtctgcactcttttattcttggtcaggagattaaaattgatcacaggtcacacaagggagtcggctgtggtatcacagctcaatgtggttaacgaggacagcacttgccttctgttctccttaaccgtgcacttacaagttacaaatattattgattccaggggttatctgagggtatggggggtggtgtgacttgacaatattttgctgtttttaagggataagaactatgaggcctgataacatctgggacagttatagtttaaatttgtcaaatgaagatttatacttttttgagctggcagaatccttcatgtagaaataatgaatgaaaatttgatagttgatttaacataggccaaatgacttgcagtgaaagaagaaaaataacactttaattattacctctttctcaaaatgaattgatttttgtcattgtagatctgtgctttaaacaaatgagtagtgcttagaagatacttttacaagacgccatttaagtttaagtgggtgtggcttacctaaaatcattccaaaatgtagtgtaggtgggatgataggtaagtaattacctactaatctttaaagcatatttttttctttcttatgaataaaatagctatattaacattcaagcaccacatagcattgtatgccaaattttcagactaggttaagcttcctttttctctctctaacaataaagattaaatgctgccctaaagtatattttatgaaatgatggaagaaacgatgtatttaacagtttttgctattttaaatctgtctttgccacttgtctgtgagattatagaaagctttttttactgccttgaacctcagtttgtcatctgtaaatgagcataaggatacctagtccatagtgtttttgtggggctcaagtatataagaaatatttttaagtaataaatcactttacaaatgcaaagttttaaaatatttattattactgagcttgtataatgttgagcctatatttaagacagttagtggtgaaagaccttctgaattagattctctctctttttctttatcttctgtagaatacattgacaaaacagcaagttagggtttcaaaagagtctagattgtggctggaatgtaaactgattgaactagacttcattgccggtagtggccctttatacagcctggtcttagaggatgaatcacatggcttagcattagaatatgccttctttaaaaaatataaacgtatttacaaatgattaaaaatggccctaaaaccatatgtcatcatagaaattacctattcagaaactgaaaagaaagtatcaaagcagactgctcagtttattaaaccaaaggcatttggaatgtaattcattattttacattgactttaaaaatgtgagatttttattgattctgtcaaaatgtatgctctctatactatcattagagtggttcagatgttagtataattcgtgaattggtatgtattatatagtttacagtgaacttaaatagtttctaaacagcaactgagaatttctatttgatctccctaattaatccaccatgaactgttgctatagattcttcacctagtagtgggataaatcaaaacatgactgtttgccaattgcacattaatatacatttatatgtgtattattaaatttatattaaatgcatattaatgtacattttaatgtgctccaattaaaatgaaaataattttcattattattaaatttctcatatctgtctacatgcttcataattcaagagcacttaggtcaggtgaggaagcactaaacatttcatttcacaggtgaggaaactaaggcacagggaagtaagctaatttgccatacatcacaaagctagtaggtagggaaaccgagagcaaacctaggtgtcgctacgttacccatatatttctactgtctaggagtctttatttggttttggtttcagaggtcagaaaatctgtggtagggtgaaccagacgtgaatgtacccttctgtgggatttccaaacccactagtagaaaaacaacacctccattgttcagggctttagttttgatgtatttatttaagattgtaagagaatattttctaaatgtagtttttaatcaaacaaatattacacaaattaagttatgtcccttttatattatttactcagaatgtaactgatgtgcagttgccattactgacttaatttttacttcttgagaaagtgctccagtgcgaatatattctccattgtactgattcctgggatttcatgtgatgtattctccttctggccaattcattcttttcatacttgtccaacattgccactagaatacttccccatgtggctattatagagttttcccctttcttcttctgagttggctcatttaaatagattctaatagttacaatatatgtatttgtgttttgttgcttttgttctgtttaatattctctttcaataaatcttttttgtttatattatttctaaaattaattgtaggctagtggccatgtattgtactgaaaaatcaagaaagatgactcctaaaatcaaaagtgttcttttgaacactgtttgtgctttacagtgtacatagtgttatgcgctgtataatgttttaaatttttgcatccagttttcttctgtgataacaagaaagtttgagctgatacctctctttttttgacttccagcatgccgctttttcctacccctcctcctgactgattggtccttcttcaatatctcctttagcttccttttctctttccttccttaaggtatgtgtgttatcttatgctcccctcttggccttctcttctgattattgtatacgctctccctggattaatgctcattagcatctctgactcccagcaccattttttttgctaacaattttcaaatctgtttatctagacgggatttccctcctgagcttcagatttttgttccacactccattaaatatgtccaaaaaggaacaacactcttcccttagaatctgcccctcttccactatactgaatcacagtgcagtagaagaaggacatgtaataaaaaaaaattagaatggagcaagacatgtgctatgagagaaggacgtataggctattgagatacaacagaaagctgagactcagctttgaccttgccatttataaccacaagggaccaaatcctatgaagttaatgcctaaatatattgagattatatttttattcttctgcatccccactgtcagtatcttagtataagtgctattttttctcatttaagttactgtaataggagaagagaatgaaaacatacctctagggaatctggaggcacagttttgaatgccatatatagaatgtctttgaagtattaaaatttcattcaaaatttgcatctcatttttcagtctctctacatttgtcgtaatatgaacactataatttaagttacttatctttgagtgaaattgttgccccaggagggtaagctgtgtttatactaagctatggataccccctgcaatgccatgttagtggaggttactagtaatcctggttaagaagaagaagagaagttttcctttcttatctggatttatgcagtatccccttatatccaccttcttccattcttattttctgcaaattatttctatatactactaccaatttgtccttgctaatgtacaaagctgattatatcatttcctaaaatgtttcctcagtgtaaaatccaaacatcctggtgtgacttgaatgacccctcatagtttggaccctgcctatttgtcaaatttcgcattttgcttcttcctgtctcctcctatctactcccctcatcataccccagttgttgtcagattgaactcataccccatcatgcccttgtatatgaagcttatactccccctttttctatgactggaaacattaatcttttaagactcagctttagaatgttgtctgcagtccaggtgaagtgcctttgtaactgctcctgtggtaacctatgcatccttctctcatagcaggtgtcttgctctattctaaatttttttattacatgtccttcttcctactaccccagaagctatttatctatatattcccagcacctaatatggtgtttagtacatagtaggtactcatctatgtatcttcatcacctaatatggtgtttagcacgtagtaggcattcagtaaatattaatgaataagtggttaaattaatacctaggatttgtatttccaactgattgtcctcatgattcttaaaacatcaagctggtttccagatccaaaagttgaatatgatagactattttaaaataattttatgcaacaaaaatttcagaactagatatataatgattatacaatgaaactgccaagttttgtatgcttaatcaccaatactcaaggaaatttcaattgggactgaatgttttaaagtgtccatagttttcattgttgttaaagttgtttttatggtgttttatataataattgtgttaaatatcaaggaagaaaaaatatcaagaaaggtatgcatatgaaaataatagattttttaagctttaagtacatcaagatcagttcatctgttaacattttccatatgccagtcagtatgctaagcaattatcatactattgagatatattatctcatttaatatcccagcagagcagattttatagttgagactgagacttaaaatttaaataactgtgattatgcaaggttaaacagctagtatttatagtgaagtagtatattagttggttctcacgctgctatgaagaaatacccaagactggataatttataaaggatagaggtttaattgactcacagtttcacattgctggggaggcctcaggaaacttacagtatggcagaaggcaaaggagaagcaagcaccttactcacagggtagcaggacggagtgagtgccagcaggggaaatcacagatgcttataaaaccatcagatctcatgagaactcactcactatcatgagaacagcatgggggaaatcacccccatgattcagttacctcccaccaggtccctcccacaacatgtgagaattaatggggattacagagattacaattcaagatgagatttgggtggggatacagtcaaaccatatcacatatcgatatgaacataaggatgtctgatattaaaaactgttgcttccgcttacactggacccaatattcttacaacttcttttataaacagatattctttcttttatgaacaggtatgtagtgattgttagatgtggaaaatcgcagtgcatttggcattttcagccatagtctgtacacttgaaaagacatttggatatggtatagtgtaattgatttaatgctagagtggggaaatgtgattctttaattatttttgagtcacaggatcctaggagaatgtcatgaaaagtgtgagccctctgtacacaataaaatgcatacttctaaaaggtactctgttttaatatagtcttggagtctgtaaaaaacacagacaaggcccagaactccatttctagatgatttacctattttatggatgaagaaactgaggtgcaaaaaggtcaaacatgtttctggaattgttgaccaagcgcatccatcaagaatgccctttagaaggtgattttcttgtggaattttctgaattcctagaaaagtactgtgattttaagtctcagcaatatgacagtaatactaaatatattccaagtatatttatgcatgaaaatgatttcatattttctaatatctaacatatttcttgtaaaaatctattgagaacagtaatttttttggaaaacttatgaaattacagtaatgacttagagtaaaataaaataaatttgcacagaagtttatcatttaaagaagaaaatgcagaattaaaatgaaataacactgatcgatgaatattatcaccagataaaataattatatggtagcacgacaaatttctatgtttgtgaattacattttctacctataaaattatttcagtatgacagagctattttatgcttacttgtccacataacagttctataaggagatgcggttttgtagcttctcattttaaagatgaggaaactgaggcttaaagtttaattatttatgcttggatttatagctatataagtaacagagccaagagctcattagagagatcttatccttctgaactgagcagctctccatcgtttcacatatatgcctggagaaaatcacatagatgtagaaaacaaattccagcagctaagagagtcacaagcgcgtttgctacatgttctttattttaaagcctgccacttgcttcctcagtcttgcattgtttcactttgcagagctctgaaggccagagcatacatgagtaattcagaacgattcttagctttcatttccgttttaatccatgaccctaactcatacattgtgtttcacctcatttttttccagtactatagcaaaggctagtttacttcaaaggaaactgtttaaatgccattatcaagatgcatgatatgttaacaattattacataaagtttttcaaatacagaatgtttcagtctcacaatatgattgtataatttgctagaacaattactgataaaggggttatcagtgcctgtgtttaagaatttacttgagtaaaaaatgtaaaagtacaatttttaaaaacgccttccagaaagtaactaatacaatacaatgaatgtgagttacatttactggtgattaacactttagtaatacttttgatattacatttttaaaggggtcttcttccttctacggaatgtgtgtttatggtggcagctttaatgctgtttcctactgtgcagttcaatagagtatgtttttaggtggttggttgagggtttttttccgttatgtatgtcgatggagataagtgttttaattacttttttaatgtctgtgcttttgtatttttctcctctctttccttttatttcctgctgttgagattactgcctcatctccacagcaggtggctgttgcaaatttgttttctttgtaagcctggaagatttattttgtaatataactgttcctttttagtattttattattaatgatttctttactttgggatatagtgtacttacacagtcctaaacagtaatttcctaacactatctaagaactccaatcattaagaaaaaaaatctttgcctgaggcgtattgtttgagatttttgcttacccttacttcacaatgcggggattaaaatttaaggaaattgttttatagcaaaagccaaatgagaaaaagaaacagagaaaatagaagggagggaaataaagaaaaggagaagagaaaaggctcaagagacaaagtatactttaataaataataccataaagcagagtaatgaggataaatttatggctgaaatatgaaattacattaacatcttttctagaaatgtttcaactaaaccaaatgcttatattaaagtataatttcaattattgcaataacttctactaattataagcaaattgcaatattataaaataataatgaagaaaaaggtacttcttttttttgtccaaagggtttgttgttctcattgtgtcataatgtcctatagatagaagaaaagatgcaacagatcctaatatagacatgatctgttataaaagtacaatatactcaaggatattttatccatctccataaagaaagccataattttgttaaacaaaataaaatctatgtattttttccaaatgtataaaggaagtaaaaagtatgagaccaaaaatgcatggtgaacccatattctcattgtgtttgtattaaatcactggacatttattacagataaaaaatcctctataagaatttcaaccactcaaattcaattcatttcatatgtgtacttgtacttcttaatacattcattgctttgttataaagaatatgttcacatcctttctcacctgtagatattctaaattgaagtctgatataagttctaacatgaagttaggtgaagtaattacattggcacgatagaatttgtgtgttttctacatgaagtatagaagccaattgaaatactataacttcataaaaattatttgattattttattctcttttctagtgctttttaaaattgtactgttttatacattaaatacaaagagaaattcagcatgtatcagattttcaaaatgatataataatactcagtaatccacttggttctggacttattgttatgtgctggtgtacaaaaagaatcttgtgtaatggaaaaaaatactatttaaatggtgtctccattcataacatttttaaaaatgttcttgttattctctaaccaattgtgtgatacacacaattaatgtgtgtggtcacatttagagaaagagtatagacagcagttatatgaaacagatgtttaatggggatttcaaaaatcaatgaaatgaatattattgtgatgcatggtgatctaatttcatatgtgttatattgaatcactccatttttttctgcattctgtctgaacactcagtactaaacgcatttacagcagcacatcgggaagaaaatggggagttttattgagaaaagaaccacaataggccatcattgatctattctctttctcatcaatatatagatcctagaatgataacccatatggcactattgtcccttagaagtaagacataaatcctttgagtgatctttaagtgacagatgaaacactttataatccattgtggaactgcgacatgcttagttagacacttgaaaggaatattttacttccatattgtaatctcaactgcttgggcttgaatcaggaatagcttatcttctctaatacatatataaacatatatatacatagatgcatatatttatgattttctacctacttttacacatcctgtatacagccacccaaatggcttatgattagtttgcaatatcttctttatttgaaagtgtttattatgaatctctttatcatgtaagcctttttcccccatagtttttatattttaccaaagacagtaataatgacttacattttaatgttattttagatttaccagcatgctttatgtgcacttttctacctaattttccaaagaaccctgtatagtaagcagggttgtctgcattctaaaatcaaggagtttgaaagccacaggattaagcaattttattcaattacagttagaaaatggaaataatgagattagaacccagttctttagaccctaggtcaatgctgtctgagacatgattttgttcttaatgctccaatttgaatgacactttgagcaggagtggactttatcttgctgttaatactttccttgttttgatgcacatgtagctggagttcattgtagtctatagaatgaatgaagttagaataatactcttatgtggctacatcctttcattttagccaaagatgctaagtttcgtggactgtgatactacctatccaatactgaccacttaaatatgtaataatataaactgtgtatatcatggattagatgatcatttaacttatatgtactcaaacgtatcatttcattaagtcaaacaaaggctttaaggaagcaaagaaaattaaaggaaacatttatttcacatctgtgcaaagagctttatatacctgtttttcgtgttaattctcccaacagtcctgtgatgaggaagctgttgcccagaaagtataatttatttggccaaggtcataatagctagtaagtgctagaactagaattttaatgcaggaagtctgacttcagagttttcagtcctatccagtatactgtttacaaataattatacaaataggtcagtcggccttaagatattttataagatttaataaacaaaaataaagacaaaagttgttacatggatttttcttttactaagacagagggggaagttagcctggtttattccataaatacatgtttaatctgtatattttaatactgtccctaatgcagcaccatttcccaagccagcattagaaaataaggactgagtaacataacatgtgagatctcacatacaaaagtactttggaaggtgaaaaacttacggtatttgccatcagctacattttgctgatctcatccagaaaacttgagagtagtgacaatcagtgttgttttatttgtctaccaaagtcttattgaaaaagcacctgtgtgaaataataagaattggtgttcctgtagagttcagtatactagagcattgtccatttgtttttgtttttgtttttgtttttttgagacagagtctcactctgtcacccagcctggagtgcagtggtgcgatctcagctcactgcaacctctgcctcccaggtgcagcgattcttgtgcctcagcctctggaatagctgggattacaggcatgagccagcacgcccggctaattttttttttttttttttttttttttttttttttttgtggagatgggtttttgtcatgttggtcaggctgatctcgaattcctgacctcaagtgatccacccaccttggcctcacaaagtgctgggattacaggcaggagccaccgtgactggccagcatcacccatttctgtgagccacagcctttggccagggacctgaggtagtttctctgtggtctgtgctatcttcttcacacctgggatttgtgagtctatctccaaagatgactgtctttctcatgatggcttagctgtcattcagatgaatcctttcaaggacaggaagcatcacacaaatgcttgcatcattcagttaacactaaacaagtggcttggtgaagtaacacaagcaaacattatagaatctgagtaattcttaaacatgccctaccatagctatgaaagcaaagccttaaaagcttttttttttctcttattacttcctagattttaatatgtaacagaacatctaatatcttgttcatgttaactgaagttgtgcaaaactttatgtgagcacaaggaaagaatttactatatatactgctgttatttattctgtagttgttccagagggaggtgctttggcaacaatgcaaggatacacatttcaaagaatatcaaatagtgaaaaataaccaggatatacccaagaggaattcacttaagaaggaaaacatttcagaaagggattgtactggagaaaataatcacaaaacaaaaatgctgacaagagaagcagccagtcctttctctgtcactagattggaacctggctgcagacacatcctgtgaggtacgcatatctgcagccttgtagagaaacttaatacatacatgttgaatgattactttagataggactggttatgtagcttcacattataacctggcctagttataaccttaaacatgaaaaaggcagccattttgaactcataacatagactctacaaccagtgtccacgttagaaattggcgctgcttcttacatgttctgtgatccttcagcgagttacttaatccctatatgcctcaatttcctcatatttaaaatgtggataataacatcagttgcctcatacaattattttgagaattaaaatgagttatataataatcacctgggggccaggcatttagagtagtgtctgtagtcaataaaagttaatttaaattttctgtaacataagcaggatccttccttccttccttcgttcctccctccctccctccttccctccctccctcccttctttttcagagaacgtgaaaatcaccatttaaaaataattcttaaggaggtgttcctttgtataaatgcatgctaaaacaccaaaaacttcaataactattctaaagaaacaaactatccggcctccttgaaagacaaagactatacatatctactacgctgaactgttttgtttgtcaaatctttgtcaattcatctttattcataaactctctttttcacactgaaaggtgaattaaaaagtcatttcagtgtcattttgaaatcatcctagtatagacacataccttatttattaatatgccacctactctcagagaagtcttcctttgatagatgactatttgcaagtttcattttctttcatatttcacttaaggttgcctcatttttctttctttgtggaacttgatttacatatgctaaggtttaatactttatttttatttaagcttttattctttccttgccatgcaatatgaagtatgaaataattgataaattatagaataaacctatcttaatattaatagctaatgtttaatgagtattcacgatgtgccagctctcaattatatatatggtttatccatatggatatatttttaatattttcataattttgtaatttttttaacatttttaaaaaatctcacatccatgagagaagtagaatttttatctctgtttttagaaatgaagtagtggaaaatcaatttcagggttctccagaaaaacataattagtaggatggacagatgggtagatagagatgacttattttagggaattgggctatttaattgtgggagctggtaagtccaactccttagcgcaggacaggagactggaactcccaagtaggagctgattgtgcagacttaagacagaatttctccttcctcagggaaaccacaattttgttcttaaggccttttgattaattgattggatagggcccacccacattattgaggcaatctccttaaagtcaagtggttgtagatattaatcacatcaacaaaaggctttcccagcaatacctaccttagtgtttgattgactaacgggtgttatagcctagccaaattgacatctaaccctaaccttcacaggattcacaggaacttatacaataccacagaactggtaaatgagagaggaaggactcataccaaagtctgtctagtgacaaaatccctgcttctgatcatcccacagcactatgattagcatagactatcaaagtatccacatggagaccttcagatgcactgtccctggccagaagggatgacctgtcacccaggtagaggaggagggctccgtggaccttgaggccctatgtgtgacctggggtgtggctaaataaactggaaagaaaagctaattatatgtagcatatgtatatgttggtttgaatagtcaaatgtagacctaacttcagtcttcttttaacaggtttcagaagaaatcattttgtcattagagagccttcaagaacatattcagctatttttaccaaccccatccctccaacccaggttttctaaaagaatcacataaacggccacccatttatataattgtttctgttactaatatacctttttatgtcataaaagggggaaacagtcttatccccatttcctttacagagaagctgaggcaaaggcaggtgaggtggctcccctaactatgctactacataatggaaatcattttgaaagcaaaagttcttttaaaatcatttatgagcaaatgctatggaaaaggagattcaggggatgctggatggggaagaaaaatgtttggtttaatctgaagagacaatggtggtttattgctgattacaggcaacccacagaaaccttcagctttcagatcagatatggcacccaccttatctcatatgacaaaagtcatccttcggctatgcttattactctgtatctaccagcaaatgtccattgcccttcatttcattgtaaaataaactcctgcctctctagaatgacccattggtagaatgagtcttagtaataaaataaaactacatgttttcccctgcatttatggaattgagatgaattatttctctacttgccttggatggggtgactgctataagattttcttcatttacactttggaaaaaatttagtctgccatttattttcctttcaaagttttggtaagaatttactaatttatagttgatatatgtacaatgtagaaaatttggaaaataaggaaataataaaaattggaatatccttaataccaccactctaaatgatctctgtttagattacatggtttatattaatacatttttttacaaaatttgaattatactatacagagttttgaatcctgcaggttcatttaagactgtattttgattacaatcttataccatatttctcaaatattcgttctgttgtctttttcttttatacggtaaaactaatttcttcatttacctgacattctggtactctctcatcttattttcctctttctgtattaatcatttttgtgcattaaacctttatttgcatgtgtcagtattttcttaagatagatttaagactattttctagatattgaacaccaatgtatatttccactgaaagagtatgacaagttccatgtctacccttggtgtatagtttaattttcttaaatatttttctttttatagagaagttacaattttattcttttaatttgcagtttaatgacttaatggagttaatatttttagtgcttataggtgatttatattttttcttctcccaatttttattattctttatgtttccattgaaaagctaatatgttccttactgatttggagaatttatacagtaaagacatttaattattaaaacatcttcttggttaataattttcgttttaattcatttatattttttaaatttagcagtggttgaattattgtggcaaaatacattgttttttcctttaatttttttctttcattaaaaaagaaatgattttacttattcaggaattagataaatatgtacccatttttaactttttttatatttagtactttaatgtagctgaaactgacttatttatgatatgaggcaagaatataacctgattttccctgtaatgttatatatgtttatgtgtgtatatacatatgtttccatatatttataggtatacattaatgtgtgatttacgatgtgtacttggttatatattaaagatatacataatatactctgagatccgttagactgtattatgtacattttatattgatttgcttacagatgttttcctctaagaatgacattatttcaaagattaaagttttcttttttgttttaatatctaataggaaaagcccctcctcctgctaatgatattttataaatttgattacttaggtttgccagaacccaataaagatgccatcttccaaggcctgacgcaggaccaggggttttatacatccaaagactttttgccacttgtagccaaaggcagtaaagcaggtataacatattgtcttttatgcttaatagtgagtatgctattttatttatgataaattaatatcaaaatcaagctcagcagcacattgttcagctctcacacccaaccttgcctaagacccaaatgtaaaattaaaaaaaaaaaggccgggtataacagtttgccagaatcatctgtttgttcattcttccaataaagtatcatcgtaaggaattttcactgtaatatatatgtctaaactacatcatgaaaaattgcttcaaggtaagcaagtccttaacaaacattggaagatgtttttcaaagaaatggcatgaatcgtcacatatcttatatgatttgtatctacacaggcagaaagattgactgtcttctcttaaacagtaattttatgatgttaaaataaaatactttgatagacaccctatcactttatacaccccaagaagaaccacctgaatgaaggttgtaccttggtttggcctgaccagagtcattgtctttggggaaaattgtaatattttatccaaagtcagataatctaaatccttcaaatgtatatttttaaagaggtctgagccacagctattcctacattaattacatgtagaaatgatacaaacttttatgcttctcccaggacttaaaacagtaagaaactttctatattaaattattcttcagaagtttacagctaaagatgcataccctctccaccttctgcctctcagtagaactggatgtttgtatgtctgaaaccctttctgaggaaggtcatagtgcacctagcttgtatttgaaaattacagagtgtcccaaatacaaaatcttccaagcaaaatgattacacttattgaaattataggtttattctattcttggtaccatttaaaaaattatagtaattgatcttataaacagttttatttaatcttattatacactgctacctaacacataaggaatacttgcattttactttttttacaaggatcttcatatggacagcaaatcttaatagagatgaccttgagaaatggatgcttagaaagtcatatttcttttactgcccagtttcacaaacaaaaccagaggaaagcagtgaaagggagaaagatttatttgaactatttcaagaaaatagttctcagaaattcttcagttacataaaggacacttattcagcacgttaatattcaaagttaacaaaatatataacagaggtatgtgttagaaattatataaggtaatacataaaaaagtattataatgaaatattgcaaaccgttaacacagatcataaggatcacttttttcttctagcaaaaggaaaattatgctgagttaaagatagatagcacaattttgatgaagagagttttaattgattgattccagtctgttatgacctaaacttctcaaaatgtgttgtaggaatcctagaagaaaaaagaaactaaagatactgactatgaaattacatatatgagcatatttttaaaatgggaataaaactgtctttcaatgaagcagaataatttgatagtgacacttcatcctggaaaactgcaagatgcaattttacactgctttgagtacaagtatcttttgagctgtcatgcagaaatggtttctctacttgaaaatggggttttcctttcatcattcaggaatgtgcgcctgtcactctccattgccatcgatacggggagtcgtgattgtacttggagctggagacactgcctttgactgtgcaacatctgctctacgttgtggagctcgccgtgtgttcatcgtcttcagaaaaggctttgttaatataagagctgtccctgaggaggtaaaatggaaccatcagaaaatatggagttgtactccaacagattttaggagatgaaactgttaatgtttaaatcgctagaatgttgaaattgtcaaattcaagtttaaaaatttcagggctacacataattgtttcttttctaattcagacattccaagtaaaagaaaatttgtaatactgatttgggtaaaatgagaaatttaatctttgtcaatactcaagggcttcttgttagtgttaatatgcttgaaatgtattctatgtaactagtaacaatgtaaagtgctaagtcttccatatcctgaatagtaggtactcttcacaaaatgtatgcatattagaagaatgtggtaataagacacatacggaattttccgtaagccaatttacagactgcattctaagatgtataccttggtcatactttcagtcagttcattatttgtgaagcaaatagaaagaaaagggtgtcatgtatatttttaaagtgctctaatataagcactactcaaaattagtagttagttagcatactaaaaataacgtttggctgtgcgcggtggctcacgcctgtaatcccagcactttgggaggctgaggccggcggatcacaaggtcaggagatcaagaccatcctgactaacacggtgaaaccccgtctctactaaaaatacaaaaaaattagccgggcgtggtggtgggcgcctgtaatcccagctactcaggaggctgaggcaggagaatggcgtgaacccgggaggcggagcttgcagtgagcccagatcgtgccactgcactccagcctgggtgacagagagagactctgtctcaaaaaaatagtaataataacatgtttaaaatcatttcattcttaccagtgactggtgagtagtcttgggtgaggtatcggctatttacatgtactacacacttctcaaattttaatgctattagagaaatataataccttataaagaatattagttctgagaacaagaaccaaatgtatttatagaaagataaattactcatttaaatcaaatcagtattatgaacttgacttgcttcggaatgcctgaatgtgtttggagtctctatactaggcaagaattatagctgtagtcaataggtaatttgtcatatgtagattacccacattacaaattaatcttaccaaaatatcagggtcaccattggttcatggctgagtttcaaattccacgtttattatctggacttttctccatccaatctaccctttttagacttttttataaaatccaaggtagtttttatgatcataggtttcttttttttttttcctgggatacagtcttaggcaataattagtgtaatcatggtttttttttacacatagaaagaaacattttgatctttgtattcctgtgcatagcacaggacctggcacatagtttgtacttgagaaataggttttgaactaaacattttaaatattaagtcttatccttctgattccaatgttagaaaagtttcattaccaaaggtgacttcttgagggttggaaggggaagatgacactgattggcaatatcaatttacttcacattttatatcatagtcatcttccatttgcaagggtcactggaaatgaatggtggttatttcttctgtcttaggtagaactaagacacaaacaaactgagaccagataagaagagggtagcggtatgaatttatttattcattcattcattcatttattaaaactacatttactgagcatctattatgtaccaggtattgttctgggcaacttagatacaacagtcagcaaaccagttagaatttcatgccctcatggaatttgtacctagtgacagaagatacccaataattaaacaaataaactgtcacataaataatatattgaaaagtaattagaactgtggagaaaaattaatataggagtataatgagtgtgtgagagatgaggataatggtggaagagaaggcagggtttgccattttaaacagggtggccctggaagacctctccgatgagatgatttttgaacaaagagatgaggaagttgagggaaagtaggcatccaggagataaacattccatggcaagctaaatgccttcaccctttattgtggaagtcttctggatttgtggaatagaaaaaacgccagtatcatcagaatagagtaagagaggacagaatgtggctgaccggattatgtattgtaggcattcataagacctttagcttttactctcattgaaagagaaaaatcactgggctgctttgaacagagaagtgccaagctctgatttaaattttaaaatggctactctgctgagaattgactatagtggagtggcatcagaagcagagaggctagtcaggggctaagtaaaagagtgagctattggttaatgtgagtagattacaagaagcacaggatcagagtagaggcatagcaccttggaaggccagagctcagctgcctgaaacttgattaccaaagtgttgagaagcaacagatccttgagataataggtaacctgcctgcagtagagcttagtagaactcaaatgggtctggtcttaattaaaactagaagaacaaatgttagattgtttgaattattttattattagcttacaattaaccaaatttttatatgatattaaaactaattgaccttgagcttcatgagagaaagggccatgatcatctctctgggtcacttttaccttccgcctgtttagcaccttgggtgctacctataaaagattcaaccaataattgtggaatgaatatttactggagggaatcagcaccgaaggctttctagcattacacgggctaataccttccaagttagataaatattataacagtaggcctttgaaggttcatctcataattataggcaaaatttcttggagagatggaataataagtaatatatgattagattatgcaaagttttcaggattgattctcttaccaggggtaataccatgtaaggactgggaacttttggcattcatagaagtttcagtgttaatcctttatggccattgcttggttttgtatacatcaaaagaggagccaaaatattgcagtgctaacactcatgaaactggaaagtcaggagagtacaggtccaatatcattatctactttaagatacaggttttgaaaggttaggtctagcacataatttttagccaatatgaagaatttaatattggccctaatttcttgagtaattgtcttctttctcctacactgtctcccctagtaaaaacttcagccacatttggtttctttagagtcagtgaagattgagggacagggacatttagagatgtcgtcaaatatgtgtgttatttaatggtcatggactcttgggtgtaatttggaaatagcatggtttgtcagtaaaatgcctcaccattaggcatgtcaacatgtatatgtctgatggtgcagtctaattctcattctctgagtgagggaaatacagaacaatatgaagtttacttatcctttagtgacaaatatgaattatgacagaagccagttacatttaacatggtttattagtccattttcatactgctgtgaagaactgcccgagactgggtaatttataaaggcaagaggtttaattgactcacagttcagcatgactggggaggcctcaggaaacttaacgatcatggaggaaagcaaggcaccttcttcacaaggtggcaggaaggagaagtgctgagcaaaaagataagagccacttatacaatcatcagatctgtgagaactcactcaccatcatgagaacagcatgggggaaccacccccatgattctcccttgacaggtggggattatggggattacaattcaaaatgagaattgagtgggggcacaaagcttaaccatacacatggaattgtttgagaccatgtatattatgtggttagtaaccaagaactatatggttagactcaggaatgttttaatccacaaaagtaggagacatcatccaatagactctgtagtgacaaacacatcccatttctctaatgtagaggttttcaaactttagggtgcattaagtcacctagagggcttgttaaacacagattgctgggccctgtccctagagttgctgattcagtaagtctggggtgggtctgagaatttgcatttttaacaagtttccttgtgatgctgaggttgctggtccactgctctgatgtatcatcaacatgctttccagctgtctaattagagtcacaaacagtgtgctgtgtggaggtactttccatcttggctaagaaagcattaatactaaaggatataggtttgatgaaatgaagatatgcaggcatcatcagcatattgatgtaattctgattccaagtgtctttccagctcccttgtggcctcacacacatgctaaataggatgctactgacaaactagcgcttctcagccatgggtccttagggaaaccagccaatcactcgacactatcctctaagaagatgagggaaaatctgttaataattccctccagtactttctgcaagcttaaataggtgagattaaatttcacaggataacagaatcccccaaaatgctggtattaaaagctgttgacagatcagatagaactgcaaggatgctttaggcagttgggaatccctaaaaggaggcatgaaggtcagaactcaacagacctgctagagttgataaatttaaaggataaggttagagaaggactttatatttcttattaattattaccgagaagaggatggtttcaaatttacttttaatagcacaatcccacacacaaagtatatttcaaagatctgttatttacatattcaattttccaataggagcaaaacacgattgatctttaattctgctgcatttttatggggcctgcatgctacccctggtacgccttagcttccctttgtttgtttgtcaaaatggtaactgatttaactttggtatgtcagtttttacatgttttagctattgagagggttaactgttttgataattaatgctactttattattttaattagaaaaataacaataccggattgctcagtctgttcatcaaatttttcttcatctggtactacaactttgaaatagcacaacatttaaaagaatgtgccttttacctgatttttttccaccaccacacagcataccccataatagatcatttttgtggcatgacctataggcctcttctcagatatttttaatgtcaaaggaccatgttaaagctatgtctatggatagttttgtcatcaatttcttatggctaaacatgcttttttttttttcttttttttttttttggagatggagtcttgctctgtcacctaggctggagtgcagtggcgcgatctcgactcactgcaggctctgcctcccgggttcacgccattctcctgcagcctcctgagtagctgggactacaggcgcccaccaccatgcccgtctaattttttgtatttttaagttcgaaacggggtttcaccatgttagccaggagggtccccatctcctgaccttgtgatccgccctcctcggcctcccaaagtgcggggattaccggtgtgagccaccgtgcgtggcctaaacatgtattttctacagataactgatgttttctagttttaatttaattacaacaaatatgaacctgggactatttttagaaaatagcccccataagctgacaaatttaattttatttactaaaagtgatgcttacagcagttcttcaacgtttggcacctgcacgtcatttgagttggtgttcttcatggaaggtaatcagagacatgttgacatgatttgctctctgaaggtagctgaaaacgaacactcacacaaaatcttctctaggcacaaaaagctaattaacagtagttaggggctcccctggtactaagatattaaagtacacctttaagactttatgatgacagggggatgacacattccaaggatctgtatatatttatcttttggaaagttgtgaaacttcagtgtagtatgaaaaggtagaatggaatagtcaaaaaggaattacagttggagcacttggttcttgatttacattctagtctgagtatgcccatctataaaattagtgttgtaattatatgcttcttaaagttttttccattcctcattttatatttttaacattcagagaaatatatatgaatgatgtggaatctggacaggaaggctctatttcttcacagagtgacagctctatactgaaaattttagaaatgtgtataaatattacacttaaaacaaattgcaattaatgtatccccagccaattggtgaggtaaaatctaccatattcaagacatgagtataaagaaactgacaggtgaaattgtcagaattctacagtacatgtgataattcagatggtgagtggaaaaaaaagaagactgcaaataggccaggagccaacaaaagcttgtgcccatttaagattacatattttaaaagcataactattttcaaaattctgaaggaggttgttgcattatgttgaccaggaatatctgaggagctgaaaattatatgcttttaagaaatctttactaatcttctatatatatttttttcacagcatatatatatatatatatatatatatatatatatatatatatatatatatatatgtatgtatgtattttcacagataagcccacagattcattaaaagtgaacgttttttacctggtgtgtcactgtcaggccttatttaataacaacaagttgttattactctattaatttttttttcattttagtagtttgtaatgaaaattgtatataagactactttattcctgcaccatctctatcgtttctatcttatgtttgtcctgttcctttcccacttggtgagatttggctttccattcaaggatcttttgtgggtttttttcacttccaacctaataaccaccttgctggggcaatgcccaaacgaatagttgtcctattagcccagtctttttctgctgcacccgttcaatgtaaatgacataattcttcctgtaaccttggaccactttgccaacttgctgaactttttagtgtcctcacacaacctgaacttcatcatcctttcagatgggcatggatcaaacattgtacttctatctcagctctttggaaagagggaagacataattgttctgtgaacatgggaaggtgcattgaaataccttttatggttctttcttgctgtcagaagtcacaaaggagttgaacttccctttggccactgcctggcaataattgaaagtgggaagagatctgtatgctctacttcattcatttttaggtgaacattagaagcccctcttcatttaaaaatattcacctccgcttttcaatatcttttcttgtcctataaaatgaaaatattaaaaagtaatttgtataatctattaaacacacattagtcaatgtatatgctattcgaaagacataaatgaaaaatacacatgaattaacataaaaacaaagaattgtcattgttttaaaagtgattttttaaaaaattttaaaatttttttctaaaattctaaattctaaaattccattctaccttttcatactatactgaattttcacaactttcaaaaagataaacatatacagatccttggaatgtgtcatccccctgtcatcataaagtcttagaggtgtacttaatatcttagtaccaggggagcccctaactactacacgtgaactcatccttcaaggtctgctccaaatgtcattttctcttgaaggcttccttagttccctaccaatttaatttctcttttctgtgggctttttatgcttcctgctgttaatagaatttatcacatagggtacttattactttatacttattccataaactgaaatacaagcttctttattggattgatgaattcaacttggtatctgactcaacatatagtgcagcccttgattcaaggtggcagaccagtgaggcatgttgaattagccaatatattaaaagcattgaaaacttcataggaagactttaagttaatatgaaattttcaaaatatataattttacgtatgtacatacaactcaaaattatttctgatagcttttaaataagtacacattttattttatttctttattattattattattattattatactttaagttttagggtacatgtgcacaacgtgcaggtttgttacatatgtatacatgtgccatgttggtgtgctgcacccattaacttgtcatttagcattaggtatatgacctaatgctatccctcccccctccccccaccccacaacagtccccggtgtgtgatgttccccttcctgtgtccatgtgttctcattgttcaattcccacctatgaatgagaacatgcagtgtttggctttttgtcgttgcggtagtttgctgagaatgatggtttccagcttcatccatgtccctgcaaaggacatgaactcatcattttttatggctgcatagtattccatggtgtatatgtgccacaaaaattaattcaagatggattaaagacttacatgttagacctaaaaccataaaaaccctggaagaagacctaggcaataccattcaggacataggcatgggcaaggacttcatgtctaaaacactaaaaacaatggcaacaaaagccaaaattgacaaataggatctaattaaactaaagagcttctgcaaagcaaaagaaaccaccatcagagtgaacaggcaacctacagaatgggagaaaatttttgcaacctactcatctgacaaagggctaatatccagaatctacaatgaactcaaacaaatttacaagaaaaaaacaaccccgtcaaaaagtgggcaaaggatatgaacagacacttctcaaaagaagacatttatgcggccaaaaaacacatgaaaaaatgctcatcatcactggccatcagagaaatgcaaatcaaaaccacaatgagataccatctcacaccagttagaatggcgatcattaaaagtcaggaaaccacaggtgctggagaggatgtggagaaataggaacacttttacactgttcgtgggactgtaaactagttcaaccattgtggaaagtcagtgtggctattcctcagggatctagaactagaaataccatttgacccagccatcctattactgggtatatacccaaaggattataaatcatggtgctatgaagacacatgcacatgtatgtttattgcggcactattcacaatagcaaagacttggaaccaacccaaatgtccaacaatgatagactggaataagtacacattttattttaaactgttaaaaaaaatattgcgtcacatttttatgtcaatctaacattaaaagtagactgaaaaaagtaaattatccctagttttcagtctcttaaaagatacctgagaactaaaaaaaaaaaaaaaaaggaaatacgagcaagcaatatataaaaaagcaaaaaataataaaaattactagaatccgagagtattagcaggtggcagaaaacagatgatcctaatttgtaaagaatttgtacatggaggcattttaagattaaaggaggaactacaaaggcaccaagttacacagaacgtagttttgtgagatactccaacagctgccagggaggcttgaatccatcaaaacctaagatgaagaaaataggtgttaggtttaagaaaacgtcatcatatgtaactaacctgcacattgtgcacatgtaccctaaatcttaaagtataataataataaaaaaagaaaatgtcatcaatagtaaatgaatagtgtttaaaaatactctttttggtcaggcgcagtggttcacgcctgtaatcccagcactttgggaagccggggcgggtggatcacgaggtcaggagctcgagaccatcctggctaacacagtgaaaccccgtctctactaaaaatacaaaaaaattagcggggtgtggtggcgggcgcctgtagtcccagctactcgggaggctgagacaggagaatggcgtgaacccgggaggcagagctcgcaatgagtggagatcacacccctgcactccagcctgggcgacagagtcagactccatctcaaaaaacaaacaacaacaacaaaaaatcaaccctttacttgttaaaagagatgtatttaatgatagttgtgtcaagccattttaagcctctaaattattccttacattgcatatctgggttttgcagcacaatagtgacacaataaaattagtaaggactcagttaagggacgactatatttatccaatgtgtagtacaactctcatttggttaaatgtttctttatgttcaagattcttcaactttaaaaaacttaaaatgaaaacattctatatgtgaatgaagcctgtaataccataccaggtactaaaagaaggaatgtcaatttgtggtctcagcaaactttttttgcctaattaaaagaataattgcagaatttgcttgtacaggccagagattaattaacatataaaaattgttctgcatttcaccactcaaaataaaataagtcaaaaattactaaatattaaaaaactgtttagtaaattaaagaatatgagatcaagtgtgaatgggccgagtttgatgcctcttcctttaccctccttcatgtccttggtaaccaagataactagaagattggattgtgaaatcaaattcatatgaattaaatatcactctgtatcaaactttattattaacttcaaggatacaattaaaaacaaactcaggtaaacaagaagtgcaggaccactgcccacagatttcctcaggttctatcttgctgcattaggatttgctctaaaccagattaacatgtggtctctaagtcatgtaagtagctccatcacttaggtcaaaaaacttgtttcacttatgagacatctaatttatactcagatagttatgtaacttgcattactctttatagtgatctatgccccctaaattcacgtttccaggtttgtttactatagcaatcctaaactaacagatacgccatgccaaaagcattccattggtaaggactcttccacttataaatgacaatagtttgtttcccagtaggatgtttacatattacatagagctttaaccaagctgctttccttcttttcttcttgagataaactcctttacccttccacacccacttcttcaaagagagagaatggattccatacaagaacttcctagtaactaattcctttccagtgattaattcctacttttctttcaagattagcttatatagcaccttttccatgctgtcctttcttttttttttttttttttttttgagacaggatcttgctgtgtcaccaaggccagaatgcagtggcgtgatcacagctcattgcaatctgaaacatctgggctctacagatcctcccacctcagccttccaagtagctgggactacaggcagatgccaccatacctggcaaattttttaaaaaaaatttagtagagatgaggtttctctattttacccaggctagtcttcaactcatagccttaaacagttctcccacctcaaccttccaaagcactgagattataggcctgagctaccatgcccagcaatgctgcccttccttgatctgcactactgctaggtgaaatgcccatttatgtgccattcaagtacactgcctttacacatgacaaagattcctaacttggccaatttttttttttttttttttttttttttttgagactgagtctcgctctgtcgcccaggctggagtgcagtggtgcgatctcagctcactgcaacctccacttcccgggttcatgccattctcctgcctcagcatcctgagtagctgggactacaggcgcccgccaccaccccagctaatttttgttgttgttgttgttgttgttgttgcatttttaatagagacagggtttcaccgtgctagccaggatggtctggatctccagacctcgtgatctgcctgccttggcctcccaaaggccaaattttaatcaggctcctaaaccttctccaaggcccacctgtgtacttccccataaagtgcagttttagcaagaaccctccattatcaatatctgatgacactttttatcccccaaatgcgagttaaactccaaatacagaatgcggaggtaggaagtaatagccaaggagtaggttgcgggttagtagataaaatattactgaaaggaaacatcaaggtaaggcttaatcctgttggctaaatcaatctaacaggattcttgcagaagacaggcgagggtaagacatcacctgggtcatagtggaggatgaggtacctgatgagatattgaagatgattagatatcaagggtgagggattttgctaaactgacttagcagggttattgctaaatctggattttacaaaaaagcacacaagtgggcttaggaaaaggttcagaaacctgactaaagttgggtcaagcaaataatgtttgtcatacattattacctacaaatgctgattttctgcttctatgagatttttaaggcagagtttattttaactgtagctcacagcactatttttgtacataatatttaacaaatgtttggttagatttatgcatagagcgtgctcttaccacatggctctgaatgtttctggtacatccaataatttaacagtgatgaaatgagataatattttctaggtttatcactggccaaagtggacttctaaacaattttgcttctaaataatatttttaggtttttgtgttcatatagaatggataaatggtcaattagtattagagggtaacctttataaagaatgttgtttcttcatattgcttctcaaactttggcttattagaagttattccagaatttaatatatgctggttttgagctctgctcattatactttataacctattcttgctttgcctatgtgcaatctaaaagtgagttgacatcatgcttttaattatagaaaattaagttgtttcataatttctagagtatgatgcctgtaatattaatcagaccaaatcatcgcattacataaagttaatcattaaaatgatgatcattattgcaagtttatagcatgctatttttatttcactcagcatcagccacatatctttcctgaatatggaggtgaaaatcaaagctgagaattttttttaactttcccactactgtgtaaaaagaaagtgacaacctgatttgtcaaatgtaaaaaatggacccttatagctgcttactactttattggtggagactaggaaaagagaggttggcatgtttgcttgataaaccagttgtccctcataaagacatgctccatcaaacaaataaatatatatgggtgccatgaggagaagcattcatatccagattcagagttactgattattaatgattattgacaaacattagttgttaaaaggcactaacactgacatgtgtgaattacttgtcacagaaggctggttaatttaaacagtaacgctgcatgtggttagaccacaggtcaatttggtccatgttttctgatagcagcataacttgacaactgatgaggaacaccatttgcttttttatttcaacctcgcaacataggatgatctgggcaggtagcatgtcttctgctgtgtcctgttacttacattgggatggatgtttaatagccattcactcagtatactactagttggttgtactttccttaatttgaatgttcttcagattttcataataatttgtccttcattctactaaacaaaactgtattcaaggtctactgtgtgccaatcattttgatagacacaggtagggctgtgaccagtcttgatgccctgtccttccatgtgacattcacttgatgcctcttcgttggcttattgactggcatatattctgatttgctgggtgtctatcttaatgttcatgggcttatacttatcaattgttgactattttaatatcactcttggacataaaggatagaatgttaaataaggtattcttcctctaaagagtgttgagaacgagtttactatcgaacaaacttatttaaattctgttagtttttaaattttgtatcttaagataatatgttctgtgtatctaatatccactttgtgaagtagtacttttttttgttctaaatttactctttatctggattcaaggtgtctctattaactcgtttacagtattgggttcataaatccatcatgtggttcctatatttcatgattttatagtacctgtaaatgagcttagactgggaagcttgagtctcctcttcccacaaagggaactatgtctagccaagcccttcacctttcactttagcttttccttttccactttgctttgtttgaggttcagcaactagaatcatacagtctcattatttcaaatatactacagttgttattcttggacataatgaagatcacataggatttcgtttcagccagatcctaatttcagataagttttttcatcccttagtgtatttttggcttctctgagcctcagtttctcctctgtaggaagaaaataatgcttgtccacagattttttttttctttgtgaggccagcaagcagcagtgtgcctaaggctgtatgctaaatctgtaaaatcatgatgatgcccagtgcggttttggctttttgcaccacagcacggagacaaagtcggtttgaagctaaatactttttttttgtaacaaatatatgggtgtcataacattttctgtctgaagattgagttacaggtaaagcattatatgtattttctgtgtgaagattaagtgaattacctgtaaagcacttaaaagaatacttttaagtgttataaatacttattaccattattatttatcttcttataaaacaagatttatggctgggcgtggtgtcttacgcctgtattcccagtactttgggaggctgaggtgggcggaacacttgaggtcaggagtttgagaccaacctggccaacagagtgaaaccccgtctctactaaaaatacaaaaattagccaggcatggtggcgggtgcctgtaatttcagctacttggaaggctgaggcaggagaatcacttgaactggggaggcggagactgcagtgagctgagatcttgccactaccctccagcctgggcaactggcaacagagcgaaactccgtctcaaattaattaattaattaattaaaataaaataaaaaataacaaaaataataagacaatacttataacaagacaaataatagatttgttaaatagtgaaagtaaatccttataatgtccaaaaatatttcaaagtatatttcacttcacatgtaatgtcaattttaatttaggatctttaagatgagagcattccttcaatgattgggacaggctcaagatggaaataaagattttattacttacagttcctgaaggggtacacataatgcacagaggccacacacacggaggttaggagtgcatggagagagagaaagagaaagagagaaaatgggacctgcgggccagtgcctttatttatgggtccagggcgttatccaaacaggtttctcgtgggaaattttaactggttggtttaaagcaagcaggcacaagttccaggacgtcaagcattgactgagaggcagtcactgtggtgtgtctgcacagtccatgcagggtggagggtcagcaggaccagtccagcaggctgcatctactcgtttcatagggatgtggtgatcagggagcaggtgtataagggaaatatcttgatccaccacactgagaaacgggggtgctgcagggaggtagagtatagaattggaaactatgtgtgtcaagggtgactgaatctttcttctgctataacaaagtccagcttatatttaaaatagatgccaaggcagcataaaatgataagcattcactatacaagtttaccctgtgttttcattgtcctagtatttccctatttcccaagataaatcttaacatgatctcactctcccaatattaatactttccaaacaaatatatatatgcaaatgatattactattttttctttaaacaattttccctttcttatgtaaaatggaaaatctagctatcgagctaaatagcagaagtggtgtgatttatgtctgctgcttaatagtctagttctacatgtactagtgagtgaagaaaatctccaaagtttcaaaagcaaaaatgcagatgaatctctgtggggtccagtgctcatgccatccccagtgcactgtcggataattggtaagaatgccagatatttgaatacatgtaatcaaacctggggcacatagatgagcatatgctaaagccagtttttttatgtttgtaactatatatggttatacaaggtcctcaaaaatcaaaaccatggtgagaacattactaaacattactaaaacatgcttaggcattcagtgattaataatctttattttaaattcatagaagtttttgatttagtcatgtccaattttttgtttccaaatttaatgccaaatttgccaaaatatataagagattatctatatgtaataacagatactgtagaggtattaatagatagcaaagatagagtgggatcaaacagatcctaaatcgatctgtaagacatattcccaataggtacagcatagttcagtgtttcatttctgccctccacagaaaacagtactgttacaggtacacattgtatattgatttattcaaaccataaacatttggagttgttattcagtcaagtgtggcattatcattaaaatgtagcaccacttgacattttgaaacacaataaactggtttatattgatgagttataaggtgatatgtggcacaaatatgacaaaagcgatacagaaaacatattttacatattggaatcatatttattttgtaatttgaattattcaaggaataatttgccttccagaaatcatacatttttattttgtagaaaactaaagaggagtctaaggtttgtctttgtgctgccttttactaacctttgttattgggccacctttctcttgaaatcacaatcttatttctaagtgatattgaatagctgaagaatgattcagagaaaaaaaaagtgaattcagaaaatagcaactatgagtacatagccttctatatgctaaattctgctttaggcattttacattttggagttgttttaagtaacaccacacataccgattaatgagatggtgttctccccattttatatataaggaaactatcccaaataagcagcagagcagttttcaaatttgattcaattccgcttacctctaatcttcctgtctgaggagtgagcagttttatatcaactgttttgtatgtttaccagcataacatcccacatgttttgttttatattgctaatttcttgattttcataataaaaagggaaagactgtgtaataatttttatgtggttccaatttttaagcctttaatgacaatattaaaaatatcctaaataagacatagattgaatagcttcaaaataatgtatagtatagatcagtgtttcccaaccattttcttcttaccctttttgggagtatctttagatttttttcttaatcctccctgctatgattttaataccatagatatactgtataactgtttacatactttagctcttcttgaagggacaagaccattatgatatctgaggatttttttctttcccccaagaattaatttttgctccctaggggcaatattcctgtctttgaaaatgcatcatagagaacaagtgctgagccagtcagctataatctaataaagacagtggttaacaaagtatcatctgtgcactagaagcatagcatcaccttaggcatttgttagacatgcaaatcctcagtccccacttaaccctccaaagttagaaactctgaaaatgggcctgcgcagtctggtttaattagccttccaggtgattgtgatgcatggcactagctctggataggttgttgaaagatgggcccatggcttgattacagcattgagttaattattttatgtctcagtttttccatcttgacaaagctcagataactcttagtttgaagcctcatacacacaacctcagtggaaacattacccagggagcctattgagaatctacctggctttcagagtgaaggaaaataataagacaacatcccaaaacacttcagtaggacatttttgcattttttaaaaaaagaacattcaacatagtacttctgattgcattgacaaaggcctggatttctccaaaaacaattaatggaaaaataagcaaatgagtaaacattaatattctgtctcaatgaacattccattatgcatatgaaaacaaacagaaaccgaggtatccagattttatggcaaaatgaattacgtaggaaatggggaagaactgggcattcatcaggaggacatgcttgtttcgctgtcctcagtttttcatttatagtatttgcttctgtggttttataaagggaagaaaaaatgttttttatttcttagttctacagagtttctctagtctttttctcctacctaccattctaatcatgtacttgcacagattggctcacccactttattgacttttttccagcttggatgtatgcaacctggtaataaacagaagtatttattttaatatgcagcatgattaaaaaaagagaccttaatctactgaattgaaaacataaaaataataggctactatggtcagaaacctcacaaactaccaaatgtagagcatgcagtacttaaaacttgagaaataccttatgatgccgtgatctataaacgtccacattacaactccaattcaagactccctgagtcagtgatttacaaaatgcaaataactggtaactgaaactcaggtttggtgaaagaaaaagctgcatattgacttaatatcataagctttagcatgtgtaattcaattagaaatcaaatactgtgtggaataagaaacattttcaagtttcttctctgttctgttttgttttagatggaacttgctaaggaagaaaagtgtgaatttctgccattcctgtccccacggaaggttatagtaaaaggtgggagaattgttgctatgcagtttgttcggacagagcaagatgaaactggaaaatggaatgaagatgaagatcagatggtccatctgaaagccgatgtggtcatcagtgcctttggttcagttctgagtgatcctaaaggtacagtgctgggagctgaaatgtgtgatgcaattgtctgttattttagtgctgtaatagtttctagctttcagggaattgtttttcactttaaaatttattttcctcttctagttaagaagtaaaagcaatcttgattcaaaaggcttagaaatgttatttaatgcttatatagaattatttttaaagtggcaagtattgaaaagaacattaatctttcttttaagcttataaccaaaacacatattctactctataatgatatttgccttgtttcttatagaagaatggctttttcttcaattagactagagtaagaaaatgaggcagagtagttggaacagccagtcttcaatgattcagacaaatcaaaatctaatgaatggccaaaaatagaatttgtgtttattaccatccttgtgccagatcatcacttcagatgtcagaattatcaaattagaaagtttaaatgtctgtcattttcacctggatggcataaatgagcatgctaagaaaaacaaaatgttttttaaaaagataatgagagaaagaaatgttttatataacatttcaactgaataatgattcagtcaagtaagactactttatgttatacttttcccacatacagtgtttctgtgggtcattgtagatgaaagcttatgtatctaggtactttcattttacaaatccttttaccttttaattcacattattgaaatgacaattaactcttttgttttctgaagggaaaataaaatatgtttttctaggtcagagattcattaagaacaaccataccaaaaatctctctaaacctgatgattcctatgacttcctactatatccatgctaaaattacattttttgtctgaagttggaagagatatatacatgaaaatgtatatttttatgccacagataagtaaaggattcaactagtcatcagatattttatctgcagggcatcaaacatcttggtatgtggaaacatccagatgtttaatgtcatcgagataaatgttttcaaatagctggatgatggcctaaatttgtcactttttatctagacatttatgtggtatgtagacacagtcagagtatagtttatttatttaactgaattcaggaaggaaaaaagaatgatatataaagtgcttatattatcttaaaaatcccattcttcttactattaaatactatgtacatcaccaaaaattgagtaaaatgttgaatcatgtttaactagcaattctgttgattatttgcctatccaaaaaggttagcttaactatttaaatttgtgttccataattgacaatcctaatattaataataattatattttcctaaacaaacctgaacagatttggctcagaaaacagcttttgcaatctcagatacgattttataagcttgtgcttgtgtgtgtgtgcgcgcaggcatgtgtatttgtgtatgtatgtatgaagaataaaagatttaagttagcatataaaatatgaagaaggagaaaatttgatctattcaagtttgactaggtcatttcagaatttatgcattttattccagaatttactgtgtatatttcttctagtacttcacatatgccacctcttataaatttagagaagtcaaggaaaaaaatgtttcttcgctatttttttttcctcttctggtttgaaataataaactgcctgtagaaattatccttaagtagaattactaactttaccaggagccttccatgtttactttaataagaagttattctccaagtgagaggggagctggcagagctgcagtgtgagatagcattcattcctggactcccatctaaatgttttcagtactgttcttttggatggaaaacattaaataaaggagtcacagaagcagtgtttgttagaatttgatcaagaagatcttactcaataggatttaaaatcttaatagtttcaaagtcagaaaactgtcatgtgcacacatatatgtaaaataaaatgaaaagcattttattggaagcaagatgtccatttgggtaagaagagaagatattcatgttaatcctcttctaccataaattcttccccatcctaacactatgtcatgtcatttctggatggtacctagtgattatcacatatgtgatacctgttttaatgcattcatcttttaaaatgtttacttctctttccacccctccacttttctccttttcaacctcactttgcccagacttcagtgaactgcatgccaaatgcagtgacatcctttcagtccttagtatattttctgcattttatgattgataatgttaagaattctgtttaaaatgctctcctccaagtcacttaaactttctgaggctcaatttctttatctactaaaaaaaagcgtagtaatacattatctttctacctctcaggactattgtcagaattaaaatgaaataatgtaaaagacttggaaacaaaactagagcatattcttgtttgtgacactctattaccttgctgcttcttttaactattcctttccaagcctatcactgactgcttttcttcctctagctttttactttccaaagttcagaatttgttcattttctctccttatcgtatttatttcttcagtgaaatgaatgtcttgttcattctttcatttatccattcatacgtgcattcattcctcaagacatataaatgaacttctctgtgccagacagtggctagacttacagtaggcactatttcctttttgtgtaaaaatgactcttaaatctagttttccactccccatttcgcagaagacctcctttcatcctaaatttttgctcaggcatgtgacaaacatttactgagtacctaatgaatgccaggtgccaaattatattctagagagtatgaaaatgagcgagtcattgcatgggctttaaaattccatagactagggtggaggcagatctgtaatcaattaattttattacaaagtgaggaatgtgtacattaagagagatttgcacaaagtaaaaaaaaaaaagttcaccttatcagatttacctaaaacagatcttttctcaaattcactattattgcaaatggtaccattagtactccccatagccaaagttcaaaattttaccccagttcaaatttctaattataatatttattaaatgtaccaatgttatcttatactatggtataaagcttccacttctcaacacttgagaacatcagcaaatggccttatatacattctgtgtatccacctatattttcttctgttccctgttgaattattcctgccagcatccagcacagggaacattccatagtggcaacacagaaaatctttggtaaatgcattacataaagacatactgaaaaattcaagtaatgaagtaaacttgacagagtacatataaagtacagtgataaattacactctcagaagtctctggttgcaataatattgtaaatgaaaatacttttaaaatctcaaatatatcaataataagaacttgaaaagctaagctaattggaaaattgaaaggagattacatttttaatgtcagttttttctgaaatattccacaatctttgtaagtttctaaatttgtttcacaatggagaatgtaaaataacttttttagtgttatacacctaatatatctgtaataaatattccctatcataaaatgataagtgcctcaacagcttatagaaaagataagtatatcatttataaaataaacttggataagagtttgggattatagttgctaattatttcgttgccactaaggataataagagtgataagtaatcatcattactttacataattctgtttcttccatcactttttggattgtaccagggagtgggaagtaggaacaaaagactacatattccatatccatgtgcatggaatatgttatgtgccgatcagcataatttaattgaatacttcattaaacactagctcaaattttaaaggcaatggtgtccaatttctgactcaattgatataacgtcagccttaaatatctttcttgtgaaaaactcaaaatggttctacttttaaaaagtctcctctattccctctaagaatgtacgactccatatcacgtcacattaacttgggattttgttgttctagatagactgtaaaggctatcaggagattaagcacaaactttctgtaactgcatttctgctttacaaatattgtccattcactggaaagttctaaacgtttatttaaaatatgtatatgtatattttattatacatatatgtataatataaatataatataaatatatgaatatatatttctatatatgatataaatatatatatttcctaatataggatgtttcctcttctgctaaacactattttcaatatttattgaattgaattgtgtttcttcttgtttgttggtacagtgtcaggtttaatcgatttattgtttgttttatagtgtatctctccttctctttcttgttggaaccaaactggcagttgttaagtgggcccaaatttctgttagttttgcattagtaagaattcttccaccctttcactaatctcactgcttcatttttacaaccaaggcaataaggttgcctgtgtcctcacattcctaggagatctggatgacataattttatgatttgttgaatatgctttcagacaactgaatgaatgtactttagctcattctgtgattctgtgcctcctccataccctgtaccacaaccactctttcattatatgaaattttgactctgtaaagatttatgttctgtgatcttccggaatctattttattttcaaattatcctataaaccccaaggagagcaaggagtgcacctttatactaaattgtagtcccaatagcaactgacatattagtgtgcccataatagatccacaaaaatatttgtgcatttgacttgacttgcttcatgttagggtattaattttcttatgagttactattttctcctatgatgggatctgcttggtttatttttcttcgaaaatgtaaaagttagaaaaataattctattattctattgctctgaatttttcctttgttgtggcataaattgttgtattcttcataatacaataaatattacactaattagagtctatctggtatattggctgagagtggggtctctggagccaggctgccccagctggaaacctggctgtcctccttctaacttcatcgtcttaatgagttacttagtctacctgttcttcatggtcctcatgctgtaagggggatgactatagtatgaatatcctagagttatttagaagaaatgaattaataatatatgtaaatcatttacatataggcgtagcatatagtaagcttaagttacagatgttattattaatctgtaacaaaaccatattttagtaattaaattgatttatattaacttttatgtagctattcatgttgtttgggaataaagtcatttgaatatcaatacttcatcaggaactttggaggctctgtcaacatgactttgtaaataagtgaagcagatgctcatacattcatgatttttttaatgagaaattgttcaatatatttggttagtttttttcctgaaaaaaagattgaacagtctgtaactgtattatatatttttaaactattatcaattctaatgtttttcatgccatcgaaaacaatttttcaactatttttagttgttagaaatctccattttgccaaattttcttgatccagatgcagcgcaccaacatggcacgtgtatacatacgtaacaaacctacacgttgtgcatatgtaccctaaaacttaaagtataataaaaaaaaaagaaatctccattttgaatttctgcaaatgaggtatgtaaaaagcacatatttttaaatgacttttgttcttcctcttagaaatggtgaaaattggaccacatttttttgtttagtgtaaggatcattcatttgtattttaagacaagaaaggcacttttgaattttcaactaagtttgagattttaaatgcttgaaaattatgggattacataactaagattaaaaacccatgttttgggaaggaagatgttaggatgaatggtgagggactcagcatcatgttgcaccacactgctcagtagagcggagacaaggtgactgagctcagggcacagccagggaagatacgacccttctgttaggaaaggaatttacgtacttcacccactgcttacattttctttctgctcactcactgggaactagagataacaaggaaacacaaaacctagatagttctgaatcttaaatgcaactctcagaaatcagctcccttgataacattgattgcagttagttccataagggagtgtttgcaggaaaaaaaaaaaggtttttaaatcactcatcagttcctcttattagaaggccctcagaaaagtttttgaaagcctcatggggtaaatcaaacattctgtcaatagcagctttgagtgtagctttgattcacttgcccccatactgagaaaaggtgcaggccatgggttaatttgccttgttctggcctaactcagaactagaaattgccagttaggcaagaaatggcctgctaagattcttacgatgcaaaaattcaagaatttttcaaatgtgtccatttttcttttctcaattgtttaagtgttgggaagagcctatgaaaaatgttttaatgttggcattatattatttaggtattcaaaaatggtagttagctatgttttaaaagacctggaatcagtatgtttgatttgatttactccttattaaaatgtaacttatttggtaatttataatgaaattgagaatgctagaacattttaataaaccacagtttttggttaacatcatgttctatttttcaaacaacaaaacatatcttatagaagctactggtggcaaaattttctttgaacaactaaccactctttatgaccttcagcttacgtaatttctcatatcaaaaataaaggggaagggggaaaaattgaatactaatttgagaaactatcataattcatcaaattttcactgttgcatgcattttaataaacaaatatttacaatgaagtttcaaagaacagattaaagaatactgcattatattgctaattaggatacctttttgactaatggcaaaacattagaggaagggacttattaaggattaatataagtaagaatgaatgacattcttacctaacattaagaactaaagtaatcagtccggtataatacactggatacaatacaataacttgcattaggattttccttatttatatttctgaatgtgctagaaggaccttagagatcatatattctaatcccctcacttcacaggtttttaaataacgtatggtggctagtgcagactctttttaaagatacgtttcagggataaagtagtgaaaagagaaatgcaaactttgcctccaagaatgcacattttaacaggggaggctcagaattacaataaattgtactttgagaagtttagattcccgaggaagcacagaacagagtctaagcattcagggaagcttcctagaggaagtgggttgtaaattgaagtctgagtgatgtgtaggagtttccaggtggaacgggggtggaagggagggaagccacagggagattatgcaatttgctcaacaccgcactgttagattaaatagtcattttacagtcattttaaaaagctgtaaaaaatatatgtctttagaaagttgtcatcagcctacttacttcatgcatgttctcatcttcgtaaatgatggtctgaatttttcatttgtatttctaaatagaactttttattttatgatttctactattcattctctcattattcaccatgcaatgaacatttcttgatgcacaactgtgttccaggcactactcaggcactaggaatacagacacaagtaaaagagtcattgcccttcagggacctataggctaatgagagaaatagacatgtaaatacatatatagcaacacagtgtgctaatttgagatcacatttggaatgggttttagagcttgagtaggagttttcctgttacagagaacatcatatacaaaagtatgggccgacaaaatgacctcatatgcccagacaacggggaggcattctgttttgctggaccagatggtgtgtggttacataagggtagggagcaggtagggataagatggcaggaaatatggctaaaatatatgtggagtcaaaggattatatgctaaagtagggattttgaattttatgctgtagacatgcaggtgacaaatgaggaggtttaaataaggaagagctctttgtcttgaatgaggtaattctagcaggtgttagagcttccttctctctgcttggattgtgcaccatttgtaataatcttcaaatagttgggggttagaaaataagcaaccacattttgagatggttcatgttagtaggcaaatgcattttctaacatttggtgacctgaattaggtggttattcagtcacagggtatgatcccacacagtaaatgccgttatgagaagctgacccagtaacattttcagtatcaggggcgactgagaacctatgctcagatgggcagctctcaagttataggtttgaccagggtggattatatatgccttatttcttcttccagattcactaatttggattctattttagtgttttggagagaggcgagaaaggtacaatgcgacaccctgactgttatacaaatgattgtttctttacatggaaggcaacatcaggagtgtggaactacagtgtcagtaattttgggaaagatggcctggaattaagaaagacaagttaaaggattaaaataattttttcagtagttaccgtgactaagttagaggaagtggaaatacaggagaaaatttggaatcaagatatatttcttaagtagaatagtcaggatttggttatctgcttgataaagagattggatgtggggtagctagctgggaggtaaacaggtgtttatagtgctgacagaactcacagatagaagagatctgagtgaaatggtggtgtgttgaatttggatttgctattgaacaactgaagcaggggactagaactaaggaaacagagaatgactgaaaacagacattgggaattagtacacatcatcttcctgtcttttcactactataccttaatgcctacagcaggagctgttcattgatttaattaattaatgaaaggtgttgtagcctatcatttaaataacagcttcttaagagtgtgattaaagagtatatgtggcattgattctggaaatccagaagcctgtcatattccataatatgaagagaaaaaaggtcagcttttgttactgttgatttcctgatggtaaatattttaaggaggttatgacatgaagggacagttttattccatggtactctctctaccacctgttcgctttttaataacacacatgattcctcatgtgctgccatgttgttttaaaatgcctgaataataacattgatagatcctgtgtaccgattgcgaaatgatgaaaatgaactatttttgccttctttgtacagtgctttgcctttaattatattttgggcaagaagaattttcaggaacctaactgaaacactgtacatgtttcaaaaattgttctgattatcagaagtatttttgcttggttgaaagatttatcatctttctattacgaaatatgttgtgcagggtgaggatgaagtggtggaatctagtgtaagtactggcatttctgcagaataactatccaaactaatggaatccttgcacaggttttctttggaattattttgaaagggtggaggtgatgaggatggaggtcaaactgataacagtgttgaaagtgattgggaatcaacaccacatcacttacatctgccttagatatccatttgaagcacaacatgatatttctgtaattattttacttccctctaataactgcataggaataggtttgtttccccagtgaatagctctgctcagagcctttccttatctttattttccaggtttcactactggttgatatcatatgcattcttacagggagacagtggataaatcagtagttttccatcaaattgaagattacatacaagaagtagagcagtggcatgtaacaagttttgttagggaaagaaggtagaaaatgggaaaaaataacgtaattgtttcagagaacagaaatcataaaacatagccaatggttttgaacacacagtgagtgtaatagatgtatttaatgtaatagatacggtgagtgtaatagataaactgagctttattgaccacagcctataatatttttattttaaaaactagttagcttatagtatagtaaaaggttattctgaaacctaacatgctggtgaaatgttaaactaaaactaagccgctgtgagatgtaaaatcaagatgtaagatttaattaaactataaaatgataatatagagtatagtaaggttcttaattatatgtattttgtattgcagagtgagattattattgttaattactttgtgtttctgttcttgactcaaagcacaatataaataggacaacatccctatctaaaatactctggttaaattagatatttggccgggcatggtggctcacgcctgtaatcccagcactttgggcggctgaggcaggtggatcacttgaggtcaggagtttgagaccagctggccaacatggtgaaaccctgtctctactgaaaaaacaaaaattagccaggtgtaatggcgcacacctgtaatcccagctactcgggggggctgaggcaggagaatcacttgaacccaggaggcagaggttgcagcgagccaagatcatgccactgcactctggcctgggcaacagagtgagactccatctcaaaaaaataagacattgatctgcatatatgctattgtataaattagaaaattacattaaatcttattcaatatctactcccaaaatatggaagctactcaattcaaatgtaatatactgccattgttggaggaggaaaccagtattaatgttaacatccatttggggatcctgcctaacagtatgtggattaatgctaaccagtgctaatctttttttcctctttaacaaccatacttgttatattttgtaattctaaagctctttaaagtgttttcaagacttacctgaccattttttccatacaagtatgtgaaagaatggcaagcatgttgcatagtaagtgtttgccaaatatccagtgattttccaagccctcctcaaagtgtatttacaattcatttggtttaacatgacccagtgtttctccctgtatttgcatactgatgccaaatgaactttacatcaccagtctcatcacattactctcatactttggaatctaaaactattcttccctgatggtgggattaaaaccaaatgcttcaatttaattttgacatcctactaatctgccctcctacatacttgtgggatgttacttcccattctttcattctgtatttattatatgtgttttgtattaattatacaagattcttttaggttctctaaagttcacaaaaatgaatacattgtccccatctgcaggagcttgcagtctaataaaggaggaaagatgcatgcaaataaagttacctttaggtagaaagtgactcaggagaaacagataaatttctggtgtaacatacagggtagagagatgacttgcagcagcaagaattaaaaggttttgtggaggcagtgacatttataatagttgaggattgggtaggaattaggagaacagagacagggattgaaagcccattccagttatagtaaacaggctggatgaatacatgggggagtttcttcgtctagattataaggtatatgcgaaataatagagtaagggtggaaaaacatatcattgctaattcatgaaatgtttttagtgtttaactatgtgaattttattccagaattgtggtactggaaatctaaagaggcacgtagattaaatatgtttgctacacacatatagggaccatgtagttaaatatgcttctcctttttgattcttgctcttctatttcactctgtatatcttacatattctgaagtatattgacagtaccactgcagggtactttatttatattttaacccaaagatccagcacagtccttaactcaataaatattcaccaaatggatgaatgagtgaagagatgaataaatggttgaatgaaaagaatgaagtgacttattctaaatgtctgtactgaaaattaacagtaagggcaaaatcatgtgaaagtgttgtatttgtgaggtgtcatgaaggccagccagccctccttctgttcagggaatggtcagacgctggatgctttctctttgcattgagaatggtttcctaagactggtcatcctgcttctactctcacttccatataatcctaccagaatgagcttctaaacagagattatttaatttcttttttgttgttgttctaaatctacaaatgctgtcctattttattgtaacaaacttcttactacagtttctaacacactccttggtttggcccctgcctatttctcagacttcctctcttgtctcacttgctttccttcacccacataaaaccttccttctactcctcacgtgctataactgcatctcatccttaacacccttgccactgttcccgcttcttggaataatctgcctctaagtcatcacgtgactggttcattcttatcctttatgttttagctctgatggcatctcatcaaagaggcgctctctgaccctccataattgctatgatctaaagcaccccttctgcttctcacatccctcatcttgtactagtctctttcatgtaaccctattcataaccattttcactatcatatagttcacttacttatttacttttcattttttatcttctgccagatgaaatttacaacacacaaggatgggtctcttatctgtggtttactacggtgcctgcagcaggatgtaatacatgagagaccaaaaacaattttttttttttttttttgctaattgaatgaatgaaggcaaggtaatgccttgctttttttcctattaaaaattatgaaacacctgggaagaatagcttgtgtacactgtcttatgtctttgccagatactttgtccataacttcagaattctgttttttgcctttactatttaactgcaagtgtcacctttttacggttcattgacctccacgtcatcaatctatttacctacattatatttcttttgtatttaatacttgttgaatttacctctttacttggcttttgtggcttagaaatattttgattctcacgtaactctgaggaattattctctagctttagttcaggttatgcttgctgacactttaaaaataagtggatgattctattgtcacctgtttttgcactctttctttggaaactttacccagccttgtgatttatttgatcccaagttgcagtgccttcatctgaggtctaggtgtgtatctccaaatgcttctgtggatttttcaggcattttccaactacatatgtagttaatttctagtgaggtttaaatcctaagggtgtgaccttggtaacttatctcaatctcacattcctcaactataaaattgagttatacctattttgtgaggatccaaagagatagtatatacagtgcctagcctagagccagctacatgctgatgaaagcgctcaataaatgttttccattattatagttttatccccattagatatagcctttgccaatgttgatattttttgagtgcatgataatacagctagttctctatataaagaaactatacttttgaattgcacatttacttatgtactaaaattgtttaaacaaaattctactgtgtgttttaagtttgcattgaagtgtgcctactgacgattgacaaggaaaaaaaaaagccgtaagatggatatcaaaaaataacattaatgagctgctaaagctaaaattacaggaacttatgaaattggttaaacataaaaaccattaaactgtttactgaagcttcacagatatactgcagctaatgagcatttctgctatttaaataagcccaaattgaacacacattacatggatacataattagtcatggcagtcagacacacatagacttacttttaaagctctatttagggaatcttttccatttgatttattttgttaattaaaatatttttcagtgttcacttatattttaataatattgttttcacaagtagtataatttactactggtttcctatttgtttttatttttccgttaaatgcagcaaatgggaattttatatgaaacatttttcttaacccctttcagtaattgtttatatcatttgatgacataattgagcatttaaaaaattttgtttgctgagaagtatacaaaaaatatttcaatacgctattttttcactatctcataattatcaagaaatattaagcacccaaatgtgcatagaattataatgattatggtccaaaccagattaaaggatgatctattccttcaagcagtttgcagtcttaaagagatggtatcattgaatataaataagcaaatcaaagtacagcatttgggaatccaacagagaatttgaaaacaattcccatatatttacttcaaggacactgacctcctggaggagatctcttccaggtaaaatgaaatccaatgttcaaggagttcagcgtcttaaatagatagaattatttcagagacataagcagatcaaggtgaagtgcttggactattttaattctgaattggtttgttggtcagtttaggaagtggaaatgaaacttccaatagaatacaaataacacaaaaggagttgctataggctattattgacatccatcgtttccattcaacttggggagcctaagtttatcctgaatagggtgagggagaagatcagatctgtattttaccctgactgaattctactagcatattcaaactgaaaattatctaaccatagcagtaggaaaatcagatatttaaattgatcaaaagaaattcactatgtgcccattcttccctagtcagtatgtttgtcagtgtagaaatactttttctccacatgatgaactgactaattgtgaaaataagatctacaagaaaaataactaagacagaataatatgaatgctaaataaatggaatggacaaatactacattttttgaccaaaaaacatatactagattccccttatatgccaattatatgctagatgctggggggaagtagctgacttaaataagttatctgaacttaggagtagtagaggtaaaacaaatacttgaaataaagtcacatagtgcctagcgtaacagaaagtcgttagtggttaattcactagaaagggggggaaaaaggtttcattggaaaggatgctctcaaggctgaatctgtgaagctagccaagactagaattctttgctgttcctgtcttcactttagttattcccatgatccccaatgctgaattttatgagactgtggagagtctatttattctggctttctcttgcccccacacccaaagtcagaagcagcaggactttggagatgaaataattggattcaaatactgcctctgccacctcttggctttattgaggatgataatatccaccttcaagggttcttttgtgatctaataagatattctatggaaatatccagcagtatgcctgccatgtactagagatccataagtgctgattgattattttttctaacattcttctttagttgacagtgatgttaatggaatgtaagaagtaactaggataaaattttcattggatggattggcacaacatgttaactgactggatgttgatatatttggaaacaagattcatggattatactaagatttgtaagctctatttttagttttgaagaagggaatgggaccagatgcgatggctcatgcctgtaattccagcactttgggaggccgaggctggtaaatcacttgaggtcaggagtttgagaccagcctggccaacctgctgaaaccccatccctactaaaaatacaaaaattagctgtgcgtggtgacaagcgcctgtaatcccagctacttgggaggctgaagcacgagaatcacttgatcacttgaacctagtaggtggaggttacagtgagcggaggtcatgccactgcactccagactgggcggcagagtgagactcctcaaaaaaaaaaaaaaaaaaaagaaaagaaaaagggaatagaaaattttcgcaacctactcatctgacaaagggctaatatccagaatctacaatgaactcaaacaaatttacaagaaaaaaacaaacagccccatcaaaaagtgggcgaaggacatgaacagacacttctcaaaagaagacatttatgcagccaaaaaacacatgaaaaaatgctcatcatcactggccatcagagaaatgcaaatcaaaaccacaatgagataccacctcacaccagttagaatggcaatcattaaaaagtcaggaaacaacaggtgctggagaggatgtggagaaataggaacacttttacactgttggtgggactgtaaactagttcaaccattgtggaagtcagtgtggcaattcctcagggatctagaactggaaataccatttgacccagccatcccattactgggtatatacccaaaggactataaatcatgctgctataaagacacatgcacatgtatgtttattgcgacattattcacaatagcaaagacttggaaccaacccaaatgtccaacaatgatagactggattaagaaaatgtggcacatatacaccatggaatactatgcagccataaaaaatgatgagttcatgtcttttgtagggacatggatgaaattggaaatcatcattctcagtaaactatcgcaagaacaaaaaaccaaacaccacatattctcactcataggtgggaattgaacaatgagatcacatggacacaggaaggggaatatcacactctggggactgttgtggggtggggggaggggggagggatagcattgggagatatacctaatgctagatgacgagttagtgggtgcagcacaccagcatggcacatgtatacatatgtaactaacctgcacaatgtgcacatgtaccctaaaacttaaagtataataaaaaaaagaaaaaaatcataataaaataaaataaaaaaaaagggaatagaaaaaagcagcaatgactattaaaaatgcatcatgaggacaggtggaaagcagaaagtatgatgtcacagaagccaggctaaaagactttcatgaggaggaagtggttatctgttgaattttgctgagaaatcaaggagcacaacaagggggaggcaccttaggtgcctgtccaacaactttgcctttgcatgaccctgagagtaaggacctccttaaattttgttctttgtctgcctcactcacctcaccctatttcaggctctgaagcaagatgatcactgagaagaatcactggacttggcgacctggaaccaattaatcatatcagtgaaaagaggtttagtgaagctttggagtcaaatgcagatgtggaatggttttaaattgggaggtactactgtacatgtatgtacctacatatgggaaacctctaatttgtagagagtggctggtaatagagaagagagtggatatagtgtcaggggcaaaattcctaccaggtcagaggagaggattcttgggcccatgtggagagaatggcttctgatagtagggagagttccttagtggtattaaaaaggaagagagagagagcgaaggtatagatccagtaggtttgtagttttgctgatgggaagaaaagagagttcccatgtgatggcttttatattctctgtgaattgtgggacaaggccttctcctgacagtgggggcaagagaaaggagtcaagtctatagaagttttgaggagtgaagcaaaggtaagacgtgttcacaatgagtggaggaaatgaaagagtaaggtcaccaataataaatcatgaggtgggaaggcccaggggaagcttgtgaactgagttttggatgtgatgatttggaagggacattagagcatacaggttataatcttaaacaggcatccagaagttccagaataaaaggaagaactcaagggagagttcgaggccatctttatagagatgaaattgaaggccctaaatgactatgatttctgacagagaaagtgcagtggactgaatatttgagagctgagaagaggaaaatgaagaggtgaagaggggctagagcccaagaaggacagtttaaagataagcagagccagggtagaggagcattctgcaaatcaaaaaagatcaaaattaatgccattcaactgttggatgctacagaaaggcaaaagagctgaagactaaggtcacagaatttggtgaccgtggagaccatactttcattcaaggaataatttggtggtgagacaagtaagcagtccaagtatatgaccgagaaattgggtaaaggaagatataagaatggcagtgagaaaagataaccatgtcaaaaacaaagtttttttcaaattggagaggagaggagaaaatgacacatacaatatactgaaaagagtaagagacagtgtttgaggacctggaggagcaggaaggtacagaatcaaggttatcttctgagagactggcagaaggaaaacaatgaatcttcattgtggagagcatactgattaaagtactgagaagtggaagggagatgtgaagacaaagctcaagccatccagacttgatattcttagttggaggcattctctggttctggcccttccttaccccaggttattctatttaaacagaactctgatatcctggccttgtaattagaatttattttgatcttgctgagattttgctttcagcgctgaattactgagattactgcctcagcacaccttttagtttcattgtgatttggtcctagtgggtgataggttatgtaaaattaaacaacaaggacatagatgaattcatctatgttttcaaggtatcattttattgtaaatgttgaaagtttttattccccccattgttttataacacatcaaactctccaaagaatactaataatccttcttcattatgatatctgttgtattgttttattgtttatggagaattaatttatatttgtgtactaaaatataacattcttgacatctttttataaaaactgagaaatatacttgtcatatgcttgtgggtttctcttttacatatgtgacagcacagctacatcagtttaattgaccttggcaatctgcatctgctagtgatgtgtccctgagggacggtttctgcaattttaagctgtggcttattgaagaacttgtgtgtcacaataccattaagtctgtataaaaaatcatttcatgcacagcattaaattgactaaaagttccaatttcaaaaccgtttcttgttataaagctacctcagagtgtctttgttttttaaataagctcatttgaacatagtagtaattaaagcagaaaattaacataaatcttgaatgtttggtatgaattaaggacgttttcattctttataaagactgcataaaattccaggcaccatatcatttaacaaatttctcttccaattgcagaataatatagactgtgaataagcatgttttgggattctttttcaagttctttttctgttcaactatggagctcctgggacatatgccacagtctccatcaagatgcaatctcatggaaaatctgagaaaactgtgcatgaacataacagaaaatcccccccgttttataaacaagaaaggaataatacaatccttctattaatattcatttaacacttcagaggaaatggcaagcagttatttggtttgcagatgtaaatatacatttttcattcacttatgctttcactccttccaagctgggtaaagacagaacagaagatttgcttctgagttttatttttattgtattccaagttaaatctatcagcagagatgtaaaagagctctgaggagttcatagaagaacagttacaatgatgaggatgatagtcttcctcataaggagcaactaaataaatgaattcctttctgagaaattatgaataacatgcacgtggattttttcactgaatccttgatttgagttctaagcttaagaaaatgattaaataattaaaataatggctatattttaaaagaattgttgaaattaggaaaggtatttagctccagatttaacaaagtttcagtaaattcatatatagtatgaatcaaattcatactatatatgaatattacatgtgcttagagtctactacatgtacaaggaaatgatcctaaccatttgatattccagttgtgatagtcattcttggtgcttagggctactgaaagaaatatttctgacccactgtagcattgcttatatttataaatgttgtccatattctactttcttagtgatctttttgtagatatttgatgagccaaatattgggtattaaaatatatacagatggtctctattttgattgatgttagtaacctcataaccagctgtgtgatctctcagctttttctttttatttctggaatgaaattaggaacatgttaaacttgaaggtctccaaaatgagcaggaggaaatttggtagttaattttcaaaaggagactgagatgatttttaatatgaaagaaaatcctttttctattttagaatagagtatcaaagaattgtttgatttttaatgaggttagctggatattacaaatgataaaataattaaaacagttgatattcaggtttaagacttcacagaataaataaatcaaatattaaggaaagaaagcttatttttaaaagtatacatgagtattatgaatgtttaaggatacataataacacaatgcatatacaatagaaatgcccatgagcagaagagtgcttttgaattcacaaataaatgcccctagggtggcttatgatgttggtgctaaatattttaagaaacataaagttacttattaaactcagagtaacatttcctgactacttatggaccgagtttgtgacaggtggagtgttaaagtgaattgttctatgtacattttttgcatcctaaaatatggtaaagcacattcttcaagaacttcaatttaatttgtgaagcatttattcagcacctcctgtgtacaattcactgtgctcaagtgaagattcaaattttatgaggcctgaagtgtatacaatttgagagctcttctttaagaaaagaaaaattcatagatttgaaattaggcgcagggctttgaaagagtcccatgcaagtgagggaccctacttaagcttcagtaacttcatgataaagttatcccttcacatctaggggggcttggttccaggatcccccatggataccaaaatccatctatgctcttaagtctgttatagaaaatagtgtattatttgcatataatctacacatatccttccatatactttaaatcatctttggattacttatggtatatctaatacaatgtatatgctgtatatatacttgatatactatattgtttagggaataatggaaagaaaaaagtatgtacacgttcagtacagacataaacattctatttttttcccaaatattttcaatgcacagttgattgaatcctcagatgtggaacccacagatatggagggccgactgtaaacatgtctttgactctaatttatgttgtgggactcagagataactaaggaattattcctaccttgctcaagcatagaatgaaatctctacttaaatttcaaggatattgctgtgaaacatgagataaatgtaaaaaaaaatgctttgatctcctagtgataaaattttgaatttcttatctttttattaattatctttatttcagatctgttgtaggccaaagttttggaaacataagatcatttctgatagaacagaattcatttttaccccttgccactatttataaagctcattacatatatcattcaatgatgatgtgttacagttgccattattaaaataggttgaattgatgagccatactcactattgactttcttgcaactcaagtaactgtcaacagatggtagtgatgatctgttatgcaacagggaacaaatgataaagatctcttttcatgtgacctttaaaaacattagaaaaatttccttaaaatgcctttctgctttgaaaataattacatgaatatttaattttcctctcaatgaaagacgaaaaaacaaatagaaacagtagaagattttaaaataaaaacctgagtatgatagcattgacccatctactcattcattcattcatccatcaatccaattgagtgtcctctgctccaaaaactgtagtgtgctctgtggaacacaggcaagcagtgtggacaaattgctgttctcatggaacctatgatcttgtgggaaaaacacaatcaacagtaaaccctcaataattttctacaactctaacattctttaagtagaaagctacaaatatataccagtgtttattttatttctatttttttcctctattttactcagaagaaactggttttaggtgtcaaaaataacattttttgtatttggctattttgtgttatacttgattcataaataaattcaacaactaacttttctgttccaaaatctcccaagctctcttcctttagtttaagttgttactaatattttctctttggagttggagtaaagaataaggcccttagtctgtctgagatgctgtgcttaaaaattatgacgttacctggagagaacattttatcctaaacactggcttactcagtttactccatcaaatagggtgttgtccacctttcttcatttcttctcttactcaaccctttctctaaattgcatccattgatctcttccacatgtcaggattatgctttcaaaatgttcgttagatatttttcttaaagaaacacagcttcattcctcttccatgactcttttagattcattagaatgcagcatatttagtaaataattgcaaaactactttacagagcaatttccacaaggaattaatggtaatgtttgcatttgttgcttttaacaaaacaaagcagaaattgctggctaaatgtaactgtatactagatccattaaattgcttaatagtaagtgcaaataatttaatgaaaatgttatatatgttgtctcattttgctttataaaatgttttgttgtaaaagggagattagccattgacctgaattcatgatgtaactttcaaaagtgacacacatgaacaagttggggataatataagtagtaacagatttgtaaaaatgatggctatgaataaagttttagaaaaatgtattttgtatgtatttaaaaggttgtactttccttctttatagatccatacttcgtagacataaatgtccgctctgaaacattgaccaaatctgtggtctttaattcctgtatgtgaggtgtaaagttaagtcagtgcccttcaaatgtgttgttaactccaatatttcgttagcttttcatttttatagtttactaaaaacagttgtttgaatccctggaacaataattaaaccataatttttcttaattttaaaattattgttatggaattgtctgttgactagtgattgtctattgtttttcacttgttttttcagtaaaagaagccttgagccctataaaatttaacagatggggtctcccagaagtagatccagaaactatgcaaactagtgaagcatgggtatttgcaggtggtgatgtcgttggtttggctaacactacagtggaatcggtgaatgatggaaagcaagcttcttggtacattcacaaatacgtacaggtaggcatttgccatcatttccacttaattcttttccaatggataagtgcttcatttatttttgatactcatctataagagcatttctatttggtatataataagcatatatacaatatgtcacgtacatacttggatacaaattttaaaatgtagactaggtagtagaactgttgagttgattaaaaattgggccaggcgggcatgccacctaatgcctataatcccagcaattttggaggctgaagcgggaggatgcttgagcccggtgttcaagatcagcctgggcaacataggaatatcccatctctacaaaaaataaaaaattagatgggcatggtggcacacgcctgtggtacgagcttcttgggaggctgaggtgggaggatctcttgagctgaggaggtcaaggctgcagtaagccatgatcgtgccacttgcacttcaacctggacaacagagagagaccttgtctcaaaaaaaaaaaataagaaagaaaatttatcatgcattcctaccatttgagtactgtgaagtcattagtcctgatgtgttcaaaatatttattattggcttaaatacatagatcatacacttatcaaatctgatggtatacaatattataggacatatactagaatctacattaattataatcttacatactccaaaagatggtttgatctgttcatttggaccagataaggtcctgtctgttttccaaattctatgcacctaagtggaaaggaaacaaacatttgatgaatttcagttgtaatttttattttttaaattaaattaaatttaatttttttatattttttgagacaaagtctcgctctaatgcccaggctggagtgcagtggcacgatcttggctcactgcagcctccacctcctgggttcaagcaattcttatgcctcagcccctgagtagctgggactataggttcatgccaccacacccagctaatttttgtatttttagtagagatggggtttcactatgttggccaagctggtctcaaactcctggcctcaagtgatccgcccacctcagcctcccaaagtgctgggattacagacataagccaccgtgcccagccttcagttgtaatttttgaaaacaatttagtttttaacaatttaggatacagaatgtgaaatgatgagatgtgaagctgagcatactttgccacaacgactgtggtcttgaggaagaaaagtgtaactaccagatctcagtagcttactttccgactaaatgctttgttttctttttgttctgtgatttaattaaatgtagatacagttacctcatttatgtaaaatgttcctggaaaatttgctcttgttaataaaatttttattctttctttcctattcaaggaagagtgctcacactatgcctttttaccactcttgtttttaccactcttgttttggttctcttgtttgtttcccacatgctaacaaaattcactttatctttaatgcttcctttaatttcttcctcttttccatgaccattttgtctattctagttgtccttctcatgtttgtgtaactaatgcaggacctacttatttgctaggtagggcctggacttgacactgatagtatcatcttttaaaagtttgattcacctgcctacttccacctcctccttggcatctttgagtagtggggcttgagttgttgggccaaaccgtggtgtcccagaaatgtaggaatctcaaaatgaatgaggtaattgggagactgaggtgggaggattacttaagcccagaagttggaggctatagtgagctatgatcacaccactgcactctagcctgggtgacagagtgagacctcatctttaaacaacaacaacaacaacaaaacaacgagagagaaagagagagaaaggagcctgtggattttgcaaagagacaaagctttgattcaggaaatagcatctagggagatgccaaatctaaaattttaaaactttaaaaagttatacatcaaaagggactaggctaggcaaagaaagaaagaaagaaaaagaacacaatttaaacagagacagacactggaaaacccaaaggagacaagttggtgagtggttcaggctccagtctttgcagtgactgaaggatagatagcagcactatgctttaccaagtgtttattgcctcagacagaggaagcagcaaaggacagctatccactcagggagtggatggttccctactttgcctccttctgcatttcctgccccccaaactatcttcctgtttttattttctcattctactcttattttcagagtaatttcacagttttttttaataataacaaaggatttattatcatttgcagatgaaataaatgcaccatcccatacttgaaaggtttcagtaagccttaacatttttcaggttgtaccaaggcactgccactgcctagttatattatgcacccatttctagagtaaaaaaactacacctccctcaacatcagttctgtactgtttctggtttatgataaacttccaaaacagcaaaaaattgcaaatatgtgcaaacactatggtccattcagagtactgcttagtcatcatcttcctcttcctcctcttcttcctcaaagctatcttcaaagccctcactgtcctcctggtcttcatccccctctattgctgtatcccactgtgggtgattttctggcacaggcttggcctcatgaacttccaacttcaatggtttaatctgatccaaacccatataggagtctgatctcagaaacacagtatactgataatttccaggcttgcctggtgcaggaaacttcagctctacttcctctgtatcttttagtgtacacacatgatatggcatggatattaatgtctgctccttcctatctgcaatgtaaagccaccaccattcttgtttttcctcaggaaagtaaaggctatacacaggatgtgttatttttgatttggtttccaatagagcgctctcttcttgctgtatgctttgtagtaattcttgccactctgcttcatcatctttgttttgtttttcatcttgctctctatcagagtctctgtcactaccatcatctttctcacttcaggaatctctattggtttcttcttcttcagaatcactgcccttatctgaaacttcttcttcatcttcctttactgcagcttcattcccaacaactccatttgccagcttttgtttctgttgctttgactgtggtaatagcacaggtgcaggtttttttttttaaaggtttctttttttttgatttagcagttttcttgggtcctttactcttctgttgccatcctcgttttgtcctgttcttgttagtttcaccctgcccatcttctgctggctgttcctctgcagcacagaaggactgctccttttcaaatacttcagccattgtttgccttgtcaacttaaccagcactgtaactaaggatcctactgtgatgttgttgctgtcttcatcatctaacacctgtgattttatattcatggtcacatatggaaaactcccaaggacagccataacctcttcatatttttcatcttcaaggaagtgcagtagagtatgacaatctgattctttaaactcaccaaatcctggatagtttaaattttatacttcttatgattagaaacctgtctaagattgtcctcttcaatgtaagggagctgcagaaggggagacttaaattgctgaagtccctgaacggccatctgagaaagcttcatgcagttttctagggatgccaaagttggagcacgaaattccctttcttcacggttcggggccattactattagttggcagtttttagtttcacagtttttaatcttacctcctgctgtgtaactctctaatctgtacctccaacagggcactctcttgcataatccagcagtccactgaatatcttcccttgtgtctctaatctacttttcatattcaccaaacatcttcatgtaaatgtctttcctacatttcagattcactgcttttaagtcaaacatttcttcccaacttgctccaactccagtatttaacattttttatttccaggttcaaacctactaagttagtggtcctcataaattactcagaataattaaaatttcaacattgatttggaaatcaatacaatgctgatggcttcttcttttacagaataacaatattagaacaaaggaaactgacatttatttatataaattaataggacactttatgaaaaagttaggaaaggctagagtctcagaataagagatacgctcaagaaagtacagttaaaagatttacattggtgcacatatacaacatgcacataattttttttcattataagacaaaacggtacatagctgtatttaccaactacttatctaagttttattcttctctcttttctatataactggtcaattcttattctatctcttaaaaactcttttatacccttattttattttatcttttgtgtggagttataattttgattgaccagaaatcttactgagcagcctgctagctcctttaagaaatgaaagtggaatcaagggataagagatgaggttcttgtgttagaccagatgaagcccagtgaatgtgtgaattcatagtgaaaatggtatgtgggcagagaagctaaaaagatttgaaaaagtaaaattgaacacaggtcagtggaggattttgttttttgttcttatcctaaatatttaaatccatttatagattttaaattaaaatgaataaacaatgcttaaatatatttatgattgtagtttggtggtgtttcacaatatcattctaaaggaatcttaatgttttttttttttctgttcatttcactgttgtcttgtaacttcctgaatctaataaatgtgtactggaaaaaaaaagaaattattttacttccatgtaatggcagataggaagtttgaatagaaatctgatgtgtagagaaaggagagaaacagacctttagctataatgaagaaaacatgcatgtgctttaaaaacacatattgctaggaatgatagtgtttgaaatataaaataaaggttgtgccatgtaagaattttggatttggttgaaggattcagacttgtcaaactaagtgttgaattacatgttaaaatggagtagagatggaaggtaggtaaaaatctctgtcaagtaaaatcaacatttccaccttcctgccagggtgttggatgcaaagtgctaagcagcgataaggctaacaaggtacatatagacaaagtgggatttttctctctccacattgtcattaacttagttctggcctctatcacctctcttgaaattgcctccactttctctcctgtcaaatccaatgcccctacactgcagccagagtcatctttctagattatcagttgaatcctaattagctcatttaaaacccttcaatgacttttactcacactcaaggtaaaggccaaacttcttagctttgagatgctgatttgaatgtccccaagcataccaagatttctcctgaatctgggcctttcccccacttcacccatttccctctggttgagtcccacttgtccttcaggattggctttctcctcctcgtccagggagtttgtgacatgaacttcctttgtgctccttgtttgaagcctgcttactggtctgtctctgcacaagctaggaaccatgtttatgtattgctgtaccctcaaaataaagtattcatctattacataggaaaaatatgcagaaatcatttatcttaaatacatttaaggaggagttaagaaaactaatgagtttgttatatgataagttcattagcatataatattgttttctcacaaatgtagcatttgttaaaaaaatttctgtaatgtctatagtatgtttcacaactaaggcttatgacattttgtcttatattttacattagtttgttttgggggaaaaggtaacattgaatagcttattttaaaatatgattttataaacagattatagtattaatgcatgcaattgggtgtttagaaattctttgtaatatgcattttcagataaatgtgattgtttgaagacatccatgttgggagaaagtggaggcaatttctctgaggagagcttcacttaaatttcatcagttaatttgctcaattaccacttattaagtaatagcctttgggcccacacttgacttcgggagggtaccacaatgcataaataagagcagtataatatagtggttataaatttgggctctctgaactacagagaagacatcagatccagttccaacactttccaatcatgttaccttggacaggttacttcagcactccagggtatagaagtgaataagcaattataaattattattattacttaaaataataattagagctgctatcttcttgggtcttgcagaagattatgaaagaaagtatggaaagctcttggtaaagactaagctttgtgaatatttgttgtgtataccattgttgtgggttattagaaatcattcaccttgtattgttaaaacgagatcaggaaaaagatggcaaataggaaatttgaatagaaatctgatgtatagagtcttaacagatgaatattgaaataggatattttaggtagttgcaaaagcattttatttagtcattaatttattcatccacatacatccatcaatctcatttatgcattaattaattcattcattcaaaagatgcattttaaaaagtagtggatataatagatagcaccaattattagatttaaatttgcaagtaagaatcctattgtctagtaaagaagtgagttgtgtaaatgtaagcccaatatagcatacttaacacaataataaaaagcatcaagttacaaaggtaacctggaagagacaatgactgattccatctggatgtgggtattaggatgtggaatcagcaaggacatcacaaacaacaagaaacaaaatttaaaaagaataagaaaaattagaataatactgggtaattagatttactgggatttaaagaaggctactggataagattttatatgttgctcactccatgaggggtacccagaccagggtacaagctggctgaaatccagaccaagctccactaatcaaacaataaaaccttttgttgttctgcttctatacagaggagggagtaccttcctcaaattttcataaagatgttctctgtttggtccataagttttgcactgtgcagcaactcctttttatttcaccaaaaagcatagggtggacaaatggaagctctgaatatagagattatataggaaaaatgagagagagaaagttcagtaattataccaggagtagaacatgatgagattgcctagctaggatttcaatttggagtaggtaatgtggtaggaattgttcatgtatagaaatgatatggtagtgtcagatctggtattaatgtgaagaaaagcgttttccagtttgtcagaaattcccttcttaagtgtcattctgttataatattaaatttacttttttagttacttctactaataattcaatatgacttcaccttaattgtttataatgtgatattagtggagtccaggcatatttattttcttctaccaaatgaataagaattactgaatacgaaagataattttgacagtgtacctaaagaaagaatttgtaactgaaagaatgactatagctaaatgaattccttaattagtttaattccttaatttctcttttcctatgaaaccaaaattaatactttgttggttaatcagaaaaagttaaaatgggaaactgtaaaaaggatatacacatacattaacctcatcattttattatttattacataagcagcacatgaccaaagcttataattttatttaaagcatatagatattttctcattttcctttttcttttaaaaaaatccagggccaagatgtttttaaataaaatagccagatgtgtattatgtatcttgcctaaatctatctataacatattgtctaccattttcatttttaaaagtggtacaagaccttcgagaatcatacaatgcaattttccagatttttatgtttgtcctgcagtcatttcagtggtttgaccaacacctaatttgacagcagtattttttaagtaactcatttttatcatatccttcaagaacattcaacttagttttcatagaatcaaccttctttctttttgcatccatataactaattaatgtttatttatttacatttatatccaacagaaacagggcgagaaacatacagctgactcttgataagtagacaactcaactaataaaagcagaaatttcgtaggtatacaggggtaccactggttataaagcatcagcattacttggccatcttttgtgtctcttagggaggaaaacaagggaaggaaatagtccagtaaatctgtcagatgcaaccaacttggttaagagagcatgtagaggacctcagtttcttcattacaaaagcaccaaatagagactgaattaatatccaatgttactaatttataaaaacacatggtgatattgtgaaattttcatctttaccctgtttcctggcatacaactcctaaaatctttggaatctccaaagtgatgagtatgtgtgtgtgtgtgtatgctaatgagttgactgatggctgacagcccataggtaactacaggataggggctagtcaccagaaggactgaggcaggactaggattgggactttcagccctgctccccaacctccggggagagtcaaggggctgaaggttaagttgattgacagtggccaatgatctaatcaatcatgcctatgtaatgaactttccataaaaactcaaatggactaggttctgagaacttgccaatagacaaatatgggtgacgggggtgcttccaggaaagtaaactagaacgcttccgtgtgccaagaaggtggcacaccccagctccacagggacagaagcttctgctctgggggccctttcagaccttgccctatgtgtctcttcatctgactgttgtgtttgtatcctttaaaatactctttgtaataaactagtaaaagtttggtttttgttttgttttgttttgttttgttttgttttgttccctgccccgccgccacccccaccccccaccccccaccccgggttctgtaagctgctctaaccagttaatctaacccgaagaaggggttgtgggaatcccagtttatagctggttggtcagaagcacaggtaaaataacctggggcttgttattggcatttgaagtggtagggggcagttttggggaatgagctctcaacctgtaggaactggtgctatcatcaggtagatagtgtcagaattgagctgaattagaagacattcagcttgtgtccactacagaattgattgcttgcttgcttgctggtggggagcagttcgcacacacctggtgtcagaagcgtgttgtgagattttagtggagaaactgagtttgttttatccactcacacagcattcagaaggcggagcacttactttgttctagtattagcatatagacagatttggttgcaaaaagtggagagaaaaaggctatatggatatctcatcatgttttgtcctgccactgagaaaaaacttggagatagaacacaaactaaattattctaaattataatcccagatcagaagctcattgtcccttcagtagtcatggtagtcctgagaaggagctcttataaacatggaacattttgtcaaataatgttgatctttatagaaattataatcacaaaactaactggtttgttacatcattagagttatttttgccgtgtcattattcttttattaagaattgttttcaattctctatattttagatgcaacgtttaaaaagccacagtatttattaccagtagtggaagggaacaactaaatgtacatgttgctgctacaaaagcagttgtggtagaaatatatatatattgagagacaaaaaataagagttattaatagaaggataaatatggaatcaacaggtagaggtagaaattcaaataaaataatttgtatagagcaccattttaaatataggcaagaaatgaaaaggaaaagatctattttcttccaagtgggattcattccatgaaaatcaaacatttaggggaaaatgcaaagtgtaaggaaggaggcgtcagggcattaaatttaaaaaaaatttgagtacatatttctaagtgacttcaggagtcactgcctacttagttatgtacagaataattgccgttgaatagttatagaatattgtttattagcagccagcatttgaagtcaaccttcaacaacaataaaaacaacaacaaaaagttaattttttcattgttggcttaggttcaatatttctactactgtatatatatatgtttgcctaaatatatgttcctaaatactattcttctgttttcttcagcaaactttatccttattaaaatatgctgtattcctatagtaagtgtccacgttaaggtgtttgataatgttttgattatttcatttatgaatctatattatttcttccaatttgtcaacccccctctgaaactaacttgtgaggcagaattattttagaatagatacacaagacacacacacaaatattctggaatgatactgaatctaaaatacattccttaaccctgtaagctcatgaagcacaagtatcttcagtttctctgcagtgtttttcagcttaatggtagcttatgtgaaatactattgaaagttacaatgaagttctttaacagttactgtgattctactcaggtacatgtagtatatgggtatattttgaaataggtgtttattaggttcatgagaactatcatagatgtcttgcattggtgacctacttttctactgcttagattttttctgtgtgtattttcttctggcttgactgaggcacaaaaaaaatcactagtggttgagggaactaagtatctcaggggattggtaatgagatacagagcctttaacctcttggtcactagttcaaatctgccccaggtcaagagtgacagaaagtcattaccatctgatggcagttcaataggctatgtgaaatgaatgtgtgatttcaagacctagtggagacaaattcatgccatagacctgcagtagagtgagtacaaatggtagctgtggttttggtttgaagagaaatgagaagtccagtcattgctagatattccatcttctttctgtgagctgagcttccttttggtggattcgttaatggaatggcatgagaaaactaggtttatgccgtgatttggggccaagaggtgcacatccattgctaatgaggtacaattcagcatcactaaattgacttttttttttttttttgagacagagtttcactattgttgcccaggctggagtgcaatggcacgatcttggctcactgcaacctccgcctcccgggttcaagcgattctctggcctcagcctcccaagtagctgggattacaggcatatgccaccacgcccagttagttttgttggtcaggctggtcctgaacttttaaaaagtgattttagtctcagatgatgatgaattcaagattgaaagttacatcattcatgtcttccatttcttcaatgccctcaacgtatattttttaaaggtttcagtttcctttttaatcatgacattaatttcatctaatttggacatatgactgaacatttagggaagccttttcattcttgttaatctttcacttgaaaaatacttagttaacaaacaagaacagacaattataaagacaattaaaaatatggaattccaaattgagtatcatggaaaaagatcattgtgataaaatctaattgaattgtgtgcattcatatcaataaatgaaattttttacattcttttttgggttgagattatgtgaggaattttgtctttctgctatctttaataaactgtcattttattaacaatttctgatttggggacattttaaaggaattatctttctgaagaggaaaaaaggcttgtttatacctgaaaattttataagatgacagcattttaataatggcatatttactattttattttatgttgggggcagtaatttttgaaatgaatccacaatgctgggttgtaagaattttaaagctaccttcaataatgcttatgatgtgggaaaaaaagtgaagaatggtaataactctgcctcgtgttaaagatttctgctctggacaaagatgaacagttgttgaaaatatgacagtcagggattttagaaaacaaacttacaagaacttctctgtgttgaagtccctgttacttagaagaccttcagtcccaactttaaataaaagacacttgttatcattatcattgcttaaaatatcactttaatttcacatcttcaaaggcattcttttgccctgaaatataccagtgatttctacaatatctgaagaactatgattcgagaattagaaatttaaattgcacaggcttaatattagagtatttccgttaccctttgcaggttttgaggcagcttattcgaccttacagtctcaccaggaagctaatgggaaagccttgcagcaatcttcacaggaaagtttccaaatgtcaagtgtcatctttccagctgttagatgaatgggtagccaagaggcatttatttgggtgtgcagcccctgtgaaatctgggtgaggcaagagaaaaggctataatttggtgtttagtttaccagcatcagtatagttgcaaatctcctagccaggcaaaggatttcattttgtagtttaatgattgacagccagctgcagtgttcttgcacttaaagaataaaaatgcctgaagaaagggcatcatcgatatgtcatactaatttttgaatcctctactgcttcagataaaaacaatcttatcaacagagctgacttcttcttctctaaacctttccaactgagaagaggtaggcttttgaaatgacaactgtattaaaatcttgagacttactgaaaaagtgtccttcagtttaagatatgttgcaaactcttttattcctgtgttaagagaagattgatataaatcattggccactgtcaggttgaaaaacaatgaatatcaataaaaagacagttttaaatcataatgggtttagtttgagatagtgatagcctccaaaaaataatattgaagtatgtcatggctaaatgctgtttccatgctaagtttttccactgggtcaggatcatactgttgagatgacttcaggtcagtctcattgggaaactgggcctttagacttaactagtaccagaaatgtatgtgatctcacctttatctctcgcaatggcaagtagtaaagtcaaatttgcttacagtcatagaaaaatgaagtcttcttcagttgcttataaataaacatacattaaaccctatagtactctccacataattttcctctttgatagtacattcaggttaaattgtgatgtgttcttcagctaatatttttaaataattattatgcatcagatacttgacactttttctattaacaattatattcctaataatgtgaaggtttttgtttgtaaaggagaatttattttttgtaacatccatatgttctaaaaggaagtcaaggaaaaaatgagcaatgaggctgtacctaatggagctatcaaaacaaaactgtctagttggtgatagagaaagaaaataccatgactaataagtaattttaatgccttttattgactttgtataggttccaaacttttattaaatggcagtgtttgacctgaaaagtaatttaaaatgaaattgtctccataaagacagaatatttccttacccatatagcaatagattgctacttcaggcagagataattgaagattagaatggcagaaataaaaactaactgaaaaatctgatccaatacgtagggaatctaaccttagttcatgttgatggagtattaaggaaattaaccactgcagtatcaattggtccaaatagagtagaagtgttatgcatcccatgccaaattttcagcgctctaatgcatggggtctgctgggtctaatggcaatgtagcacaataaaacaaaacacccaaaatctttagtttgctgtggagaatttaaatacaaaataacctagttagaaattttgaccagaattgtgttcttctgaattcagtgatttagtaaagttgaatctcaaacaagctgtaaaggatcagatcaaaaaatatccaggatggtataatggcatcctgaaagtcaagcagtctgggttcaagttgtgaactaattgctcagtaattctgccttcagacttttgggaatatcatgttgcctttttggttttctcacttatgtctctgagacagaactttgtcatcatagaggtagaattcccagctcaaggacttaacaacttttaaaatctccaatacgttatcttgaacctcatcattttcattcatggaaggggcagaattataattttatatggttctaaaactcaaataatatatataaaaaattaaaaatctaatttattgaatacccattatggttgattgtttttagaggcttagcattcacattgtgtgcaaaattacctatggattaaccattttcccatttaaaaaaatggagaactatactggatttggttaagatgtagttggccatgagttaggaagctgaggaactggatttaaaagagtaaattcacatagtaagataatttactcagaagaatacaacaataatagaattatctgaaaatgttgtaaaaattgttaaatatcctcaaagagataaagaaaagaataacatccataaaaaataaaagaaaaaaatgtaatgcctttcttaaggtgttaaaactagttaatggcaatgctgggggtagaacccaagtttttctgttctcggttctactgttcttttcaataaccagcttactttttcctcatgatgttcttttctctttttttgagttccagctgagcatgtggaagtcagaacacataagtaagttcctaccagttatcagagaactctgctccagggtggggacaagtattggactttttgtgattcttataaccaatactcaaaattttaccttatttcattttagatcacttcccatatattgaacagtcactgtataccagacaacatcctgtgagaatgtagccttcaaatacatttttaatcagttttgttctctgttgtatccctagaacagtggttaccttattgttggtggttggccaatgaaatgcctgccatatgtaggcacttaataaatacaattgaaacaatgggtaggttttggaaatgttttagattatgaggacaccgagtttaggaaatggattttataagttcacatggctcagtggtgatagatactaccttagactactaaaagatctggtgtttgatggtggggtagagttaccatgggaacagaaggatacaaatgagcatgcttggggtttgtagtttttctcatttgatcttcacaaccatccttccctatagatattgttatttctattttgaagtgacctctgggcaactacgctggttttctcttcacactctatcctcaccttagtctatttcagagaattctccttctagaaatataagggttaataggttaacacaagagcaagtattggctgatatgttgttgacttacaattttgaacttcttattccaaggcttaatatttaacatcactgctgtcacctgtcttaaatgtcagcttatttgatttaccttcgtcactctcaccttgatcatactgactcctttatgttacatggatttgctgtcaggcaccaccctgagctggtcaccatgtttttattactttagtcattgacatcttgtcagcagtatcaccacctttgccccggggcctgtcagtatggcaattgttacctttttgattgacacttttgaaaatttgtcaacatgttatttattattttagggggatctctgtctaacttaaagtcatttcttgaagttaatttactgttttattctttgaacagactctttggtttgtatgcagtagaggctataatagtctacatgctattatattaacagataatattataactagtagaatgtgaaagaaaccaacatattactgtagttcagtgatatggtttagatctgtgtctccaccaaatctcatgttgaattgtaatccccagtgctggaggtgcggcatggtggggggtgattgaatcatgggggcaggattagagtatctctcaggacaaactaaaacaaaaacacaaaataccaaaagactaataaaaaaaaacttaatgcaagaacagtactaagagatgttttatagcagtaaatgtctgcattacaaaagaaagaagatctgaaataaataacctaactttaaacatcgatgaacaataacaacaaaacaacaacaacaacaaaaaaaaaaaacaactaagcccaaagttagcagaaggatggaaataataaagattagagcaggaataaatgataaaatgaataaaaatacaatagaacaaaatcaacaaaattaagaattgtttttcaaaagataaaattgacaatttgttatctgaaccaagaaaaaaaaagagtattcaaaaataaaatcggaaatgaaacaggagacattacaactaatgccagagaaataaaaagcaagaccataagggactattatgaacaaatttgacaacctagaagaagtggataaattcctaaaaacatacaacctataaagacagaattaagaagaaatagaaaacctgaaaagaccaataacaaataaggagattgagtcagtaataaaaaaccaacccaaacaggaaagcctacgaccaggtggcttcacaggttaattttactgtacatttaaagaagaattaatatcctttcttcctaaaggcttgtaaaaagtagaagagtaaatacttccatactcattttatgaggccagcatcacactgttaccaaatccagacaaagacaccacaaacaaagaaaatgacaggccaatatccctgatgaatatggatgcaaaaactttcaatgaaatattagcaaaccaaattcaacagtacattaaaaagatcatattctatgacctataaatctctataaagcaagacttattcctaggatgcaaagatggttcaacatacacaaatcaataaatgtgataacaccgcattaacagaatgatgggcaaaaaccatatgccaaaccaaagaaataaaaggcatccatatcagataacaagaagaaaaattaactatttgcagaggacatgatcttatacatacaaaaccctgaaaactgcacacacacacacaaaaactggagatctaataaacaaattcagtaaagttgcaggattcaaatcaacatacaaaaagcagttgtgtttctgtatgccaacaataaactatccaaaaaattaagaaaaaaatccatttacaataagaccagaaagaataaagtacttaggaatacactgaatcaaggacatgaaatacttttaaaataaaaactctaaaatactgccagaaagtaaagcagacaaaactaaatggaaagacatcttatattcttggattggaaaaactaatgttaaaatatccatttcacctaaagcaatgtacagattcaatgaaatccttatcaaaattccaaatacatttttacagaaatagaaaatgtaatcctaaaatatgtatgaatccacaaaatacccaaataacaaaaacaattttaaataagaataaagctagaaacattatacttcctgatttcaaaataattacaaagcaataatcagagtagtatgctactggcataaaaacaaacatgtagagcattggaacaatagagagcttatatcctacagccatgtcatgtacagtcaactatacaacatatacaatgactttcaatacgaaagtcaagaatgcatagcggggaaaggattgtctcttcaataaatgttacattgggaaaagtggctatgtacatgcaaaataattaaattggaatgttttctttcaccacagacaaaaattaactcacaattaattaaagactaaaatgtaagacctgcaactctaaaactccttagaaggaagcatatgggaaaagcttcatgacattggttttggcaataatttcatggatatgacaccaaaagtgcagtcaacaaaagcaaaaggagattaagtgagattacaacaaactaaaagaacttctgcatagctaaggaaacaatcaacagagtaataaagcagcctttagaatgggaagaaatatttaccattaattaaccagcagttaatttccaaaaaatataagaaacttttaaaattcaatagcaaaatatttaaatagtccaattttaaaaattagcaagggacttgaatagatattttttcaaacaagccatacaaatggccaacaggtacatgaaaaaatgcttatcactgatcatcaggaaaatgaaaatcaaaaccacattgagatattacctcacacttgatacaatgactattatcagaaaaacaaaagtttgacaagtttgtggagaaattgaaacccttatacaactgttggtgcaatgtaaaatggtgaaactgctatagaaaacagtatagatgtttctcaaaaaatttaaaatagaactatcatatgatccaacagtcccacttctgggtatatatctaaaataactgaaatcattatctcaaagagatatctgcacccacatgttcactgcaacattattcacaatagccaagatataacctaaatgtctactgatagataaatggataatggccaggcgcggtggctcacgcctgtaatcccagccctttgggaggccgaggcgggcggatcacgaggtcaggagatcgagaccatcctggctaacatggtgaaaacccgtctctactaaaaatacaaaaaattagcctggcgtggtggtgggcgcctgtagtcccagctgctcgggaggttgaggcaggagaatggcgtgaacctgggaggcagagtttgcagtgagctgagattgtgccgctgcactccagcctgggtgacagagcgagactccgtctcaaaaaaaaaaaaaaaaaaaaagaaaaaaaaagaaattctgatgtatacatccaagagaatattagtcagacttaaaaaagaaagaaattgtactgtttgtgaaagaatggatagaccgggaagacatgccaaatgaagtggccatcacagaaggacacatactgcatgattccctctatatgaggcatctaaggtagtcaaatgtatagaaatagacaatagaatgatggtttccaggagatgggtgagagggatgctgggtatattggaaagaaagaaggaaagaaaagaaaagtaaagaaggaaagaaagagaaagaaaagaaaagaaggaagggaggaaggagaaagaaggaaagaggaaagaaggaaagggaagacaggagggaagggagagagaagagagagaaaaagaaaaggaaaggaaagaaagaaaaagggaaaaaagaaaaagagaaagaaagaagaaagagaaagaaagaaaggaagggaaagaaggaaagaaaggaaagaaaagaaaggaagaaagaaaaaagaaaggaaagaaagaaaagaaaagagaaagagaaaagaaaaaaaggaagggataaagtaagcaacaataaagggacacaagtaaacttttgaacgtgatggatatgtttgtgacgtggattgtagtgatagtaacatgagtgtatgcatatatccaaagcactgacttttatacattaattatgtttattgtagactgattgtacctcaataaggctgtggaaaaaaaggtgtgtaataatactgctctcagcatattaatatttaaataacaaaacaatgtttagtgaagccgttttttaaccattaataaataaaatagactactttttttaaaaaagaaagaaaagatactctgttaactgttgtgttcctagcacctggacagaatgcctgccgtatagaatgcacttgatagatatagataaattttatatgctaaggaaatattttagatcatgggacaaatggggtttaggaagcatattttacaagttcacttggctcattggtgatactacctcaggttgctaaagagctggtacgtggcagtgggagaagagtttacaaggaaatagaagtatggaaaaagaatacatcagaaagagaaaatagcaagtgtaaatgtccagttaaaggcagagtttggtagaaggcacatgtgactatgatgtgtatatttatagagattggcataaggtaagtttggataggcagacaggaccatatcatgaaagagcttgtaggctatcatgaaaagttgaatattaacaaaatccaatgaaaaactaatgaaaagtttaagcaggtgcataacacaatcaaatttctgttttaaaaaccctactctggtacagagtaaagaacagatttgagtaggaggcaaggagaatgcagaagtcagtaagaaaaagtctcagtaagagataatagtggcaaagagaatggagtcaaaaataattagatttgctgtagaatagaaatgggatttgagagagaagaaatatcaaaaataatacaattaacaggttttaacaagcttgatggatggtagtgtcataaagtaaatgggggaaaactggggaggaatagttattttttgttgaaggaggaggagtttttgcatgttactacattaagttgctaaagagctgataattgggggtagaggtagagtttagatggagaaagatgggacatggatttgaattaatatcatttaattttcagagtccagatatgctgaccattatgccatggagccaattaatattatttaattttctagtcttattttatgctcagattacaagtatagaagaatgtgaacacagtcttttaaagaaatgcgtaaaatggaatcattattttgtagaaacttctgaagcctcaaatcagaaaagattttatatcagaaggaaattttattatgaataataatttctcaaaatggagaatgaaatctgtttttatattataattgtaatcactggagctaggcctttccatcatggaaacagctaatccaaattaatttttaccctgtaagatttttccctcaatagatatttcttcaaagagcgaaggaactgatcttgagttaattattaatgcattaatccagtctgtgaattaatctagccacaagcagctatgcaatgttatttattcttttccttaaaataatttcagaatggatgtttctatagcagctgtactccaagatagggcccgttgtagcatatcacaatgaaatataaacaaaatgactaagtgaaagctgtttgattattttgaattgcatggaacatagtgatggtgatttcttcttcaatcaaatataacaaacactaccactagtattgcttttagtagtgcttttctcttcctttttttttttttttttttccaaatttcattctagcaaagcaaatcaggagaaaatgccactgggatgtatacttaccatgtgagttactttttcccaacaacataatcattacacatccaaatgtctctgctataattccatgaccccacgaggtataacagaggaaaccagtggtaaagagtaataatttaataataaaataatgggttattatagtttgactgtatttttatttctattctttaatggcattatgattgtcttaatgatatttgaatagggtatggtttttatttttgataagatttttcaatgtgtgtgtatatgtactctgtgtgttcaatcaaaccatcatgaataactttttaggttagtttcttgttttgaggacattaataatttagaaaattcatgtttatgtaagatgggggcagcagctgggcatggtggctcacgcctgtaatcccagcactttgggaggccaaggcaggcagatcacgaggtcaggaaatcaagaccatcctggccaacatggtgaaaccctgtctctacaaaaaatacaaaaattagctgggcgtggtggcaggcgcctgtggtcccagctactcgagaggctgagacaggaaaatggcgtgaacccgggaggtagatcttgcagtgagccgagatcacgccactgcactccagcctgggcgacagagcaacacaccgtctcaaaaaaaaagaaaaaaaaaaaaggttgggggcagtttgatataatgtagtttgtgtaaactttcaattcaggtcttgctctaccacttattaatctttggacaagcagtttactttctttgggcctcactttcctcatcttcaataggagaataatgcataccttaaaaatcgtgattaaaaaatacttatcactggatctggtataaatattacttgcaaatggacaactgtcttgttgattttaagaataaaatagaaaaacattttaactgtcctatttttacagtagaccttaacatttggacaatgtgttgatgcttgtcagagctgacactttattagcagatgagaggtccacatgagcaccttttagactatcttccgaacttaaacggtctgttctcttgaacagacccccagtagccacgtagttgaataaaatagacacctaacacaatattggccaagcctgaatctcttacttgataattaggaactaggaaaagaactcatgttactggagaagtgacctcatccttgaatgctctgtgtaatttcttggagggatttttaaaatatttttaaaaatactattatttgagtccccctccaagggattctgatataattagtaggaaggtacctggcctggacatcataatttttaaaactctctacgtgtttctggtaagtagagtaaaaaattactggtctagacctacacaatattaatcattctggataaagaagtagagaaagccaattggaagagggagaagaataaagtagctgtacatagaaagaaagaggacaaagcacgaaaaatcttcttactttcctcgagaattcccagctcttcctggaggcctggctgcatttctgcatgagtttcatgagatcttcctgtaactcatgataagtatctgaggccaattcattacttcccaccaaaggagttcattctaaattggaagtcagaattccagtagggagaaaaatgctctattttaggcaagaccttggcaaaagtgtgatgttggtgaatctttgtgtcatttaatgtgactgaattatagaaacacacacacacacacacacacacacacacacacacactcttaattacccagggcaattacttactcttcccactagatagctcttggagagactggcctaaaacacacacacacacacacgcgcgcgcgcacacacacacacacgcacactcttaattacccagggcaattacttactcttcccactagatgctcttggagagactggcctaaaacacacacacactctctctctctctctctctctctctctctctaattacccagggcaattacttactcttcccactagatggctcttggagagactggcctaaaatcagcaatcttccagagcttcaatgccactctatgttagaatcatagaataatgggcttttatagatttggaataaagctaatgattatttcatctaaactgattatcaccttactggaaactaatttgaaaaagacactaagtacccaaggtcactagtctaatacattcagtaaatatgttgagtatctctctgccaagtcttatgctaggtgctgaaattaaatcaagcgggagatagcatatatgtaagcaaataagtacagagtacgattaggaagcagctttgcttgtgggaagctgaggaggtttttttttctttctttcttttctgttttcatcagctatactgcaatataatttgtatataataacatttgccaatttccattataccatttgatgagttttgactgatgtatggagtcatgcaaccatcaccacaatcactcaccataaatgttgagtaggaatcatcagcctactgtgattcctgtgctgcgaaagactgagacatgaagcaaagggatgagttaagaggttattgtggtaaattcagtgagagataaccatgcttagaccaggaggtagtagtggagatgagaaacgtaatatatttggaaaaagggacaatagatttttctgacagactggctgtaaggtgtaaaagaaaaggcacaaatgattgtaaggtttttggccaaaggtattggaaggatacagttgccattcattgaaatgggcaaggctgtagaagaagcaggtttgatggcagaaaatttgcgtcaggggttttcagtttaaaatgcctaataaatattcaagtgtaataagtttaaaatacaaatcagaaatatccaactgattgcaacaatctaatcagaggagaggtctgagttagggatagaaatttgggggtgtaaattatatcctgaataaactgtaatgtgtccatcaagaaggataacatcctaggggtgtttgatgatggatacagactgttttcaaaaaaagaaagaaagaagagatgattagcacacaatgtccagaggtgaggcttcctggatgctcagtaactgaaacatccagaaatattcttgggttatatatcggtaagttatcttggcctcagaactttgtgggaatatatcttagaccatgactagttctgatttttgaataggccttttctgagttcgttgttctacactttaccacaagccccttgtggaaaatgtgcccagccaagacttcagagtttatggcgataataatcacaaagtcatggaattagggcttggaaaatatcctaaagtttatctagctccaacttcacacccatggcatgactaatagataatctgagtcatatccaatggaaatgagctcacatctcccaggacagaccctacccctaatggacaactctatttcaaaattctttcttatgtgaaatacaaacataactcgctgtagttaattttcttttctgcatctaagggaccccaatgactatattcctgcagtttgtgagtttcaacttgaccataagtttcttgggtttctccccgttacagagcctgttacacagtttaggttttaaaacttcaacccttggccttcatgacacctttgcggtatcttctgtcaagaggcttactagactttttttttttagtttaaaataattattcatggttaaattgtgataaaacatacataatataaaatttaccatcttagacatctttaagtgtacagttccagtggcattaagcacatacatcatgtttctccagaacttttttaccttgcaaaactaaaacactatacgcattaaatgatagtttatcatttccccctctgtctcccttttttacacataaggaggatttttagtggagaggacaacaggactgacttttgaaggcttagttggaattttcaaagcattaacaccggcaggaaagaacattctaagcaaaaacaaaaaacgaaaggcaaaatgcaaagatgcattaatgatattgttttatttgagaaattataactagttcaataagtggaagcaaaaaatattttgaaggagggataggagatgagattagaaagggcggggagggagaagggcccagatcacaattgggattatataatgctgaggttctgctttattctgtatgtagtaaagaagcttgaaggaacttgcagatgacaatgaaatgaaaaaaattaagtgtaatgcatatatatttggggctcctgatggtctatacttgtcatggagttaatttttagaaattttattgtaagtgaataaaacctttactcagtctccccccaaaaattctaagggtgaagaaagcaaactttaaaaaaatagtctttaaacatccttgttattttcaatttttcttatgtctaggaaggacttctaaaaaggaaaggttgctctttatctttacactctaaaacttggacatttagcttttccttaatctccatttttaccattctcatctcagttctttaggacttcagcttcttttccttttgtagttttctttagttttcattgagtgtattttgaacaatcaaagaggtcatggtgatgtccaggttataaaatgattcttgctttacaatgggaagggagggagggaaatggcaaaaattcgagttctcatttttaaccttttcaactatgttagcggattcctcaatttcatagcatataggtaaatgagatatctgacaaaggataactagaatactaaaagcattttgtattaaaaataattattaaagataaaaatgtttagcctagagaaaaaaaggagatgtaggaagtatatgttagttctgcaaaatatacttgaggaatgccatgtgaaaaggtgattttatttatatctctacagaggaaagaattgccttcaagaataagtattttatatagatggatttttttttttttttgagacagagtctcacttgttgcccaggctggagagcagtggcgtgatcttggcacaatgcaagatccaccttccgggttcacgccattctcctgcctcagcctcccaagtagctgggactacaggtgcccgccactatgcccagctaattttttgtatttttagtagagacggggtttcaccatagccaggatggtctcgatctactgacctcatgatccacgcacctcagcctcccaaagtgctgggattacaggtgtgagccaccacgcccgacatacatgcatatttttaattgcaatggagataataatttggttaagatatgtttggtcactgtcctcaaggagcttgtttttgaagagaaaattaacatgtacagccgactatgatgacagctgagtagcagcatattttaaactgtggaatagccacataaatatcttcttttgagaagtgtctgttcatacccttcatctactttttgatggggttgtttgtttgttttcttgtaagtttgtttaagttctttgtagattctggatattagccctttgtcagatggatagactacagaaatcttctcctgttctgtaggttgcctgttcactctgatgatagtttcttttgatgtgcagaagctctttagtttagttagatcccatttgtcaattttggcttttgttgccattgctcttggtgttttagtcatgaagtctgcccatgcctatgtcctgaggtatttgactaggttttcttctagggtttttatggttttaggtcttacatttaagtctttaatccatcttgagttattttttgtataaggtgtaaggaaggggtccagtttcagttttcggcatatggctagccagttttaccaacaccatttattaaatagggaatcctttccccatttcttgtttttgtcaggtttgtcaaagatcagatatttgtagatgtgtgatattatttctgagggttctgttctgttccattggtctatgtctctgttttggtaccagtaccatgctgttttggttactgtagccttgtagtatagtttgaagttagatagagtgatgcctccagctttgttctttttgcttaggattgtgttggttatacaggctcttttttggttccatatgaaatttaaagtacttttttctaattctctgaagaaagtcactggtagcttgattgggatagcattgaatctgtaaattactttaggcagtatggccattttcatgatattgattcttcctatccgtggaaatgtttttccatttgtttgtgtcctctcttatttccttgagcagtggtttgtagttctccttgaagaagtccttcacattccttgtaagttgtatttcttggtattttattctctttgtagcaattgtgaataggagttcactcatgacttggctctctgtttgaagacatttgtgcagccaacaaacatgtgaaaaaaaggtcatcatcactggtcattagagaaatgcaaatcaaaaccacaatgagataccatctcacgccagttagcatggcgataacttaaaagtcaggaaacaacacatgctggagaggatatggagaaataagaacacttttacactgttggtgggagtgtaaattagttcaaccattgtggaagacagtgtggtgattcctcaaggatctagaaccagaaataccatttgacccagcaatcccattactaagtatatacccaaaggattataaatcattctactataaagagatatgcacacacatgtttattgaagcactattcacaattgcaaagacttgaaaccaacccaaatgcccatcagagatagactagataaagaaaatgtggctcatatataccatggaatactacgcagcctccaaaagggattagttcatgtgctttgcagggacatggatgaagctggaaaccaccattctcagcaaactaacacaggaacagagaaccaaacaccacatattatcacttatatgtggtagttgaacaatgagaacacatggacacagggaggggaacatcacacattggggcctgttggggagtggggggttaggggagggatagcattaggagaaatacctaatgtagatgactggttgataggtgtagcaaaccaccatagcatcctatgtaacaaacctgcacattgtgcacatgtatcccagaactcaaagaataatactaaagtaaaattgtggaatagtaaataaaaaagaggtaactacttcagaaaagtgtataggtggtagtaaggaaatgtcccaagaagtatatgcttgaatgaatcagttgagtttggaaggattatgaagagtttaacgcatgagtaaagtcttagatttatttgtattttaggcaggtaaaatacatgtaacagtgtgatgaactattggtagtttaaattttgtgtttatttggtggtaggtggtagatttatttgtatttttttgcatataaatgtcagagaccttgtctgttttgttcatctttttaaccccaagttcttaacaaatacctgctgaataagtaaatgaatgaaaatagttctatatgaacattaataactgagtctaacaggtatattggcactatgttataaaaaaatcagactatgccatgcaaagaaattttaagttggtttcctgaaaaatatggggaagttaatgcattttaatacttaaacatataaccaaatattttcaatgtaattaattaaaataattatattttttatgatctataagtgtctcagataaaataatttctctgtaatgacaagggaaggactttagaatgggtaattttcagcagatggagaagaaagatggaatgtgaaaagtgcagaggtagggaggcacaaagtattttggagaagcaatgattgaaacattttatttctgaggggtggcttaagaacataagccaacaagacagcaaactatatattttattgtggctttaccagtaactgagcaacttacagatattcatttagcctcctttggcttttgttttctctttgtaaaataaagcttttaaagtagatagtctctttgattgttctagctctacataataatacatagaactgaaaaagttgattcaggacactctatggaggaaactaaagggcaggctctttactttgagcttcacttaatgggttttagagtatcaggatgatatggtttgactgtgtccccactcaaatctcatcttgtattcccatgtgttgtgggagggacccgttgggaggaaattgaatcatggggccaggtctttcctgtgctgttctcctgatagtgaataagtctcacaagatctaatggttttaaaaagaggagttccactgcataagctctccctctttgcctgctgtcatccatgtaagatgtgacttgctcctccttgcctcccaccatgattgtgaggcttccccagccaggtggaactgtaagtccagttaaacctctttcctttgtaaattgcccagttttgagcatgtctttaacagcagtgtaaaaatgaactaacacacatggcttttaaaaattgttttagtttaccttcaaatctatctcaattaacttgtatttattattgaaaatatgaaaattataataagcaaaaatttaaaaattaaaggtcatctaaaaccctgattctgagatgtaattctcctagcatgttgatgtttatcttttgtgattgatggataaacagaaacgtacagcaaaatagatatatgtgtttttccaccaaaaacttggaatttacatataatattataatattaactcacagttttactttgtacataataaaccctctttcatgtcaataaattattttcttctgtatcatttctgatactagcatagcattcctttttacaatatagccattatggaacctatccccattgttcaacacctaggttgtttccttatatctgttatttactaacactactggatgaatggaaaaatagtattttctgaaattgaaaatctaaataacatatttgttaggagggaatatgatgagataaaagagttgaggttaaagtgtaagagcaaagcatctacatccaaaggccttgatgtctcttggaaatctgagtttggagattgcaattgaggtttgggaggaattaaccttgtgatgggagctgaaagtagatatgcttgagttctctgagcaagggtacagagggggaacaggcttttaaaattcagaaaaggaggtgtacattagggcttggatatatgatgaagctgaacagactgagttgctatagcacgacaaagacaaagctaaaaatagccctgtgttgcacagtatgaaaaaagactgcctatgacaagtgaagattttagattatattataaacacatatacatagtagcacttttgtgaataaaagaaaaaatatataagaagctgtatttctcatttgaaagaattgtgtctgtgtgtgtgtgtgtgtattttattattgtttgctttgttgtgtttggtttttgttttgttttgaagcttaaggaaaatcttgcaaaatgtgtccaaatcattttctttctaagtattaaggcagcaatgttcgtaagaatttcaaagcaattacttatttatttaaaactacataaattaagcaatgcaagttgaactacacatatatctgcctccttgggctgttgcctaatgccatatatagctacaattatgaacaaaccaaaattcatctgtaagattgaaaaaaatagatatttcaacacacagccataaaaagagaagaatacttgtaagttcacttatttcaccttgtaaagtacagacacatgggaccatatgtagttatgctattgccatcaaaggcaagttggctcaacattgtttctaagacagagaagttgcttctatacttttactgatattaatcaacctgtagtgtcaggaaattcttctttagtctaaccctaaaacttgcttgattgaatttacattatgattacacaaagctaagaaaataccatcaagcaaggtttcataaattaagtacaaagaggctggttagtgggaccaggagaaaaattctgaaattattcccttttgtgtttgaatttcagtatgttttaaataaagttgtttgtttgtttatttaattgataatactttccatacttcctttgaaatttaaaaaggatgatatcgtatatattcggtttactgctaactgactttttgccagtttttgtcattgttaacatccatgcgtggacagatatacatacacacacctcaaattaacctccaatttcctatattttacattgtagcttttgtatttgctaataatccttttaatagtatagcaatcctgtgtgaggacagaaaaattatgttcacacccagactaaccaatattcagaaatgtgccttgaagcccagaacatccctgggagaaggtgcctgccatagctgaagcctggatcccatcaggcatctctttgcatgtaccagagacacattagtgtttcaattgacaagtttgatgcctttttacatattaagtgaactttgctttgcattgtaagtggtggagggccagaaataatttctatgcaagtcatggaaatctttatctacacaagacacactcctataaaattaaagttctgctcaaataacttttcttttgagtgatgattcacaagagaatggatttctacttttgaattaactagccctgtccattcagtaactgctttggctgagaaaattcatcctttttatattttccaatgttatttgtcttttggagatagagagagagaaggggagggaggaatggagtgagagagacactttacaaacaaaaggcctgatgcaatctttaataacctccccagtcagaaaaagagacaacatttagcaagcacctatgtatgatgtttcagtgtgccatgtgctaagagtaagtgtttttattaaatcattccaataatcctgcaaagaagcattattaccatgatcatttaacaaaggtaaatttacagttttgagtgccagtcgaagattttgacgtaaactatttgggacctatttggtttcagaaaaaagaacaaacccccgtaatgcatgagaacactacccactttccaaattaaatgtctccctgcagcttatgatttcctgaattttccagtcttcctgtgaggtagaaattaggcaagcagcattcctgctgctatactgaaaactatagagaagaaaagacagggacttattagttccctttcctaaaatcgcctaaacagtagtgaaattactggaaattgaatttaggcctcctgacttgccgttgcccatatctctgagcactaaaggtattttcataacttaagtacaaagagactggattggaccagggagaaaaattctaaaattattcccttttgtatttgaatctcagtatgttttaaatacagttgtttgttgatttaattgattttatttctgctagtactcttcatactgcctttgaaattaaaaggccatattatatgaattcagttcactgctcactgactttttgccagtttttttcattgtaaacagactgttgtaatctatattaattcggatgctgtgttgaagtgatttttttggtaaaatattatatggacaatttagatgtaatatgaaaccaagtattggtttgtattttgcagtcacaatatggagcttccgtttctgccaagcctgaactacccctcttttacactcctattgatctggtggacattagtgtagaaatggccggattgaagtttataaatccttttggtcttgctagcgcaactccagccaccagcacatcaatgattcgaagagcttttgaagctggatggggttttgccctcaccaaaactttctctcttgataaggtaagaaaatattattgaagtcatatagaaatgtctatcatatattttaattaaggtataaacattataatggattttttttactaagaaatactacttattaaactatttgacaagacctatcattacacattaatctttagtttctttccttcctttctgtcccatggaagaaggggcaggcatatattgctcatttagtattgtctaggaagcaacaaagatataaatattatgaaagtgactttttcatttaataatctcaaactcttatttttgtattattaattgtttcattatttttggatgcctcagctcaaagatagggacacaattgatttggtttgcacaaaattctggaattcaatttatgttgaaaagaatctcagtgtaacttattggtattggtgataagatagattctttataaatttggaatacagaaacctttctcaaaaacaaataccctgagtttcatttaacattatgactttgtacttaaccagaagtggacatcttatacttagtaggaaataaactacgtattaaagttgagattgagtctttaaagtacacaaagcatataaatgcatgttttcaaagtaagatgctttatacaagaggattgcatccttatatggttttgaattagaaaagaacaacagactttaacatttttagaccatttattgataaattacaaatgctaaacctctcaatgtatttaatactaactggtagttagtaataattaatgtatatgaatgtgtgaatttagtgactaagaaaagagtatcattatttgaatcagctttatccttaggcaaagaaaataatagagaacaaacatgccccattaagcacattctctctttttcctcttactaggatcaatagctggcattattatggctaaaacattaaggctgtcttactctgacagctttacaagatgcaatgtgtaagtgtggtcaggaaaatctagagaattctcaaaagtcagaaaaaaaaacagtgcaggaaaaaaatccttcgtaaagattttttatatttaaagagaagttattttttcaaatagatcaactgaatattttattaaacaaagtgtgaagcgtaacagaatatactagattcagctttagaataccatgaatcaattgtttataaccttgtagaatattgatagtatatttgtctttgtttcaattgattcgttaagaattactgagaagctgtaatcaaatgtttaatctattggagaaaactgagtctcagatagcatatactgactatattagttatgctattaaaaaacatatatgtaaaccgaaataggtggctaattgggcacaggtgaagaattatagctgaaaaaaagaggtgtttgctgctttgaatttgatgttttcttcgcttgcaataattgaattctgattaatcagagacatcagtctttacactgttggtgacatgcattgatttgtgatgctgtgtctttcagtaacctaggagcacttgcctttattaggatcaccagcagaaataaatgtggaagctaacttccttctaaacctccaatttgaatttaatctatcaatttagaagtgtgtgatgctggttcaaaaggggagttatgaacaaatggaaattaaatttggcacatgaaatgtaaccatgcggggttttttggaaaccctattttacttactttgatggtgggtacaacaaaatattgtgcagactattttaaacatatttctgcaaattgcaatgacaaaaataatgaagccaccttgggcttatgtaatgccattttcaaaaaagattattttccatacgtgattttgcagagtagtccgtttgcctcatagaggtctactttttttgtttccttatctggttcctaattagtgattaaatttgtgaatatataattacatcgtatgtgcttatttcttatttctatgctttcctattgatgaaatgttggtagtatacaactcagtagtatgaacatacttatttccccacagccttttactaaagacgtctattaaaatattacatgtactatacatttcggtgacattatagtataccaatttagattagccttattataatttattatggcaattgaagaatctatttaaaatgaattaaaattcagaatcttgacatttgaaatttggatgctcttaatatgacaaaggttattctatggggttttgttatcatatgaaatattaatatttcacaatacaattttgatgaagtacaatttgccaagcttgcatatgataaagaaattaaatgcttaccaagggagttcggtgaaaattagagccctgactgaacatctgctagaaattttattatcctgtcctactgacagtgtggctccctcgttgtttttctggattgacagctgaatattgcactgatttctgcagcaaatatgtttgcgtgaactttgtttccctttttttatttttttgggagtttggaacatgcttttgattttcatcctgtatatatatatatattttatactcttgacatttgtagatgccagattgaggtctaatatgctgtagcaccgatagaccattgacttacagtgaaatgccagttgatatctcagtaaacagaaatattattattctttactgtgcagtctatataaaagctgtatgtgctttctttagaaaggcaaatgatcatatttttaatgtcaaatatgaaaagatctgtttgcttttgtgttaaataacatcaaaaatggcttttattaactatattcttcctcttcaaatctgtctttccaagaatgtttcaaaataacaaggttgcttttcttgagattctatttatgttttataaagatagtaaagtcatatttaaaatatagttatgaaatcatttttctatacaaatgtatatcggctccaagtttaaattttgaaaggtgggagagaaatcgatctgtcaagcttgattaaagctaaattatcatgacaaaacagagaagtgatctgtttaagagggaatattagaaatggtttggacttcacataaaataaccccttgacctgtgttcacattatattgataggaagtagataaaaacattttgttttcattaattttgtccataaattttgttctcttggagagctacatattatatactgcaaatctgtaacatgaaactgcaagttgcatagctttattactgcacagataaataaactaagaagtatttatttctatcctaaatcaaatctaaacccaagcaacagttcacttcacttgtaagccctttctatacatagattaacttgtgattaactttaattatgaaaatatctcaaatgaatagattttgttttaataagtatcaaattaggtaaataagtatccatgtaataggtctctcttataaaatgctaagaagtaaagactgaaaatatttaagcctctttttttggcatcaaagtatttatgtagctgtttctgtaaaacacaaccttataccccatagcacaaagcttaatgtataggagaggcttgataaatgtttcataaatattcgctggataaatgaatacatagatttttttggcaagagcatatcgagtttatttttttcccagtatatgaacagacagttaacacataaaagaattgaatgttttgagtattgatctcaatcgaaggagaaaaggccaattaaaaaattttcatattctatgttgcttttctatagtgcatctatacgtgtctaaaaatgaaaatgtcagtgaaatttctgaatgtatagattgtggtttaagacttagattgttgtataagcctttaaaatgcagagaatttttgagaaaacagggcaagtatcacacaatattaagaagatacgtaaaaatcggctggcctaacttctaactgcatgtattggtagtcctgagagaagaaatgtaacctgttcttgaatgcttttagtgacaaggaatatactacatctttaaggcaatataacctgtatgactgtagaaagatctgttttagaaatatgttccttttattgaccccatatcacccttctcataaatttcatccatgttttatatatagttctgccctctgatacatcatggaataaataagagtaatattaatataaatgaattatttaaaataaaatgttgttgttgttgttttccacaagtaaataaatacgttagaaaaaaatctaacaaatatggagaagcagtgtagtgtggggaaaggtactttggcctgggaggccctggtcttaatccaaagctgcttctaaatcactgtcttggacatgtgtaatattataggtcattgttatagttgttatcattattcacattattagataccctatattcagtgcttaggatgtatagactaaatgtttttgtaaattatttcatttaatcctcacaatctgtttataagatagatagtattgttttcagatgaaataatagtctgagaaagttaaataaattgtccaggacttaagacaacagttatctatttgactatagtcatgtgggttggcaatttgggctcagcacgcatgatcagttctcctacttcacagggtgtcagctggcctcaatcatgcatttacagttggttgtttggatccctggggatcaagatgttccactaatgtgtctggagcctcatgtggggcatatagcaatcatgtgggattgctataattgcggagatggctgagcttttctctctatctcttcataatctctcttgcctcacaatgtcttatcaaggtggctggtttaggtttgataaggctacttcacaaggctagtagtgttctaggaggacaagagtggaagctgaaagatctcttgacacaaagactccaaagtctacacagtgttacttccgtattttattcaaagcatgttacaaagtcaatgtatgttcatgaagtaggtaaataccatccacttattgataaaaagaagtgcaaaaccacattacaaagggacatgcatagaagtagggaaggattattgcagccatctttgcaaacagtcctaacttgccctctgattagagcaattcacatccctcccaaatgtaaactgcatccactcctttccaagacacccaaaatatcatctaatcatggcattaggctcaaggttcattatcttatgatcttcatcaagtccaaatgcctatgagattatttggttttagtttctttttactgaggattctgtgatatagaaagacatgttttctatcttccatatacccaacacaaaacgatacagtcaagagaaccacagtagataaaatctcctttagaaactggagaaatggaaggcacatagcaatcacttgtccatagcaattttgaaattcagtttggcacatattttcagggcctcttgctccagggatggagaatcagggtccatttatgctccttggtaaggatgtcctaatacatttttcctatctactgttggctctgccttctgggctactgattatctctgggctactggttttctcctctgagtttttttttttttgttgttgtttgtttgtttgttttgtaaatggctaatgatggcccctgttgacagctgagtagttttgtcagcctgttcctgcccaaataaagttatagcaccctattcctctctttgttttgaattgtttcttttaatcctaactcatggtgatatcatcataaaactctgttaacataattttgaatctattaaggactaaattgatgcccaaagtcacatccataattctttttaaacagatttcttttatttttggatatgccttgctgttgtggtacaatgtctttaggaatgttagaagccctgagagaatctactaggacctgccttaggtctttctaaagtcttaacaaactgtcttactgcaatattcttgagatgatctttaaggtactttattttgagaaccttttttccatctaggagagaacaaatataaagaatagtttattttctgacccagtgtgtcctaggtcccttggattctgtctgttttgcatggcaaatttaaatatagccttatttagctcttttctctcttttagtaccttatcacacttgggtagaaacactcaactgaacacgttcagtgttctttctagagatgtattatgttcactttctgttttccaaattatcactgctgacattcttgccaattgttctgtcaccacataatacaggccacttttccaaccctccaataacaattttcataccatattttaaacctctacaacagtttgttcaccattcttccagcctttactaagatcttactcttggtttttcaaggctctgcctgcctcacaatgccaaagccagggccacatgttttatattttgttatgctagcaaacataacctatttcagcatcacgtacctattgctgcatatcagacaaccttaccaaaagcagcaacacgttttctgctcttgtttcgacagtttggcagtatggccaaggctcagctgggttgacttgcctttgcttcacatgatattagttcttctcactcatggatttgcaatcagttgacagactgtttggtggctggctgatggccggtcctggatgatttcattcacatgcctgggtcctcagctgacgtgattaggcctgtatctccgtatggtcttatcttcaaagagactacactggacttgttcacaagttgtcagtgctacaaaaaaggcaggaggagaagttgcaaatcctcttgatgccaaggctcggaagttgcacaatataattttcattgtgttccattctttagggcacatcacaagaccagatcaggttgtaacagcatggaaatggcccctcccatcaaaacactgaaatccaccacgtcaggatttgaaccaaggtctatttgatacaaatccctgcaatttccactatatcatgcttttacataatgtatcctctctggaccatattactttatgtctaaaatgaaggcagtttgactgcactcatgtcttcagagacttagagttcagcctgagcatttacactgaggactttctacccactgcttcgtatagagtggcacctatgcttgtctttctattgagaaataaaagttgcacagaaattttatatttctatgtgcaatttcagagagaatacaagagagcattttgatttaacagcttctgtgaatctgctgtcatcagaagccaattttttgccagccacactggccccctttctagttctccaacatggcaacttcctccctgtcttaggaccattttgcttggtgtttgatctgcctggaatgctcttctctcagatatttatatgactggctcttttttcttaatcagttctcagatcaaaagttacctcctcagagaagctcttgttaaccattcaaaacccaggctctccatcccacattacattggttgtttttttcttcactgcacttatcaccatatgaaattgccatgctcttggacatctatttctgttttagccacttgaagtaagctctgtaagtagagagatattgtctttcttgctcactacagcatgcccagtgccaagaacaatgtctggcagatagaaaggacgcaatacatacttgttagatgaatgaataattatagtattctaatttgaaccacaattccacatgacagctcttcagttacttggagacagctctcatgtcctatccataagccttttctttttcctttctaaatagttctgtttttcttttcataataaggtttgcagactttttaccatgtaggttgtctgttctcccatgtggattccaagaaacttgtttcaatccacattatcttaattgagaggaagttgctcctgcgtttgcacaaattgcacaaattgccagcacctatcaacgagatgagaactgaggaataacattgtcaggactgtaaatgctaaagataatatttaaagttgaaaatttcacaaacatgtcatgtaataatattttagagcctgggtaattctctatggattacaatacaaaacatcacaatttatttttgaaactcattttggaaaccttgttagaaataaagatctggattttttaaaaagattaaataaaactgatttacttatttattattaagagtttatctattacctcatcatgaaagtctatgaaacaataaattaacaatagtccagtgcattatttttgctgctatagttctagcttccaattttgtatatgattattttctatttattgcatagtattgttttcctgataatatacattaactaggagttataattgtttaaataaattcaatgtaagctttttatctgggagacttttaacatgctgaaaactgagatgacttctgtatactaatagtttatcacctagctaggttcttataacttagacgtattttattgaaattcataaaatcaactcatcctccaattataaagaattagtttattaaatggctacagttcacatatagtactcctatgggacatttcatccaagtgttcacttcaagactatttagcaagctcttctatgacgtaaccctcatttcttcatcaacaaaagaacctgtatgtgtgcttgcacactcgtgtgtacacattcaatattgaagctaaatcttgcaagttagaatctaatgaatacaccactgtctatccttaaagttttaaatcagtctctgttcgcaatcataccatgtttgccagacttagtctgttaagtaaaaaatatagattaagatgctttcaaacacaatttaatgcatgtatttcgaatattaagtaaaaatcttttaattatagccaaagtaatatttttaaccatgaagcagactaatcaattttccaatataattacatcttcaccactttcccatttcaggctgtgatttcacacctgttaattagttaatcattttggtagagtggacaaagtgaaactcaaatagactttttaataatataaattgacgtgtacaattttgatctgggttagctggtagatgaatctaacttgtaatggaaagtacctcttattcagtttccttttttaaaaaaagcaagtggtgtcaaggttaatggaaaattctcataattatggttaatggaaatttccttaaagtacagtcctgctgtttgagaaactgattttacccttattctgtctcacataattcttctgtgaattttaaatttaaccagttaaaaatctccatattttgggtatgtttagatgatacaatctttggttgaaattagttggattgaattccataatattctccttgcctttgtattttctttattgctttttaataagattctagtaactactatgtaatgatattctttatactcattttaaatactttataccatgattaccttactgtcagatttttattaaaggcatacctacattggctattttgttacaagactgactctgttttagtaaaattacagttcgctgtatgctcctttttcctaaaggactagcaatgtgcttaatgttcaagtaccactatttctgaaatgaggtgtcatgagaaataaagtgtcactaactcaaggaagttactggtgtgttagttaaatattcactcaaactgccctatcacacaccaattaccttttcttaccccactgcctcatctgcttctttcacttcagctaagcccattgcccttttcatcctgccctgctttcctcatttgcatgtttttctacaatatctcatgtgtctgaaacagtttctcacttctatcctgccaaatttaccctctatttatgtgaaaaattagcttaaaatgtcattaaagaaagtaccatttttaggtatctgggcaagatttgatgtattttgagagctcttataatgtccttttatatatactatttttcgagtgtgtgtttgtgtgtgtgtatatgtgtgtaatgtatggtattcactttagacaacttaaactgtagttcagaaaatatatacaccaaaagatgtaagatgacttaaggccacaggaattcttagactaaaatgttacttaatactaaaatgttacttaatatgcaatattttattttttaaattattttataattttaattttttaataattttttattttcaatattttatttttttattttcttcacatttgaactgtctttattctagggagaagggatagcacacggatagtcacggtcatgagagaaccgagcatatgtaagatgcagcataatgtctcatgaaatgttataagtagctgtagagatagtgagaaaggcctgtggggttaggaatttaaatgttgttgtataaacagggaacctgttgttaagaggtttaagcaaagaaattacataattcaatttggaagagactgttaatcataatacaactactgtttatcatttcaacaataactttcacttctctcctcatacaaactctcttttctgacaaaactggttttatcaccaggtttatgtttgcatcgtctataccttaattttaccattctttatcggtaaggagacatttattgttcttcaaatattaaaaggccaatgaccacccaagtcccctggagctacattaatcaatggttatcttctctccattgtctgagctcttatagaattttactcaatggacacaagagggaatggattccttttaaactccaccccaccccccggcccctttcctgaatggaagcctttggagatcagatctcgtgaccaccaggccctgcaaagggaacctgctgactgactacctccctcctcttatcaaccagttttattttgcaatgtaatacattgttcagcaatataatgaattttaaattgataaatattattacctcttgaagagtattttcactttcatggctaaatataattttgtacagctataatattcctctttaggagacatacttttgtttagactaacgtttatctaatgggtacctccaagcattcttcaaaaatacttcccatcacttgggaactcttccctatggtgcttttgaatctttggtcatagcttgctctctaggaaactcctaggaagctattgagtaacttagcttttctctgctgcaacacatttgcctttccaagggaccatattgaacagagcttaaggtgacttcacattacttatttaaatatgggtcccttaattggtccacaggaaaatcttacatttcctttcccctgacaaattctaggaatataggctagttgctgtacagttgcatctcttttagctcatcttttagcaacagacaactcacaccttttcgatatatcaagcagagtgggacactgtatacggtgcaccaacctccaaaaaagaaaataaaactgcggggaacacatataaagtgctctgaagggtcccttttaaaagctgtctctcaggatttgggatgacagtgggactcatataatcccagaagcatgctccaaagaaaccatgtcataatctccaacatccatccctaactttttgttaacattttgtttccatattggagtgaagggtgtaagagttccctaagcagatttttgttatctacttgaacatttctgtaagggaaaaatttatttttgtgatttatctcaatgccccttaaggtctcagccaaaatgtatattttaatattctgttgcattaataatatccatattgaattttacttatggacatttagtatatgaaaatgcattatttaaaaacccttacatttcatacaactatttgcatatagagatttttttttctggattttgtcagtaacatttaatttttttaatatggcagcaggttttagttcagatcttccaagaaaccgttgccaagatgtgattaaacatgcatggatttgattaggtgaaataattgtgggagacaatatggagggtgttgaggaggactgggagagccataagacagcaatagaagtcaagccatacattggggagagaagaaagaaaggttgagtaggagcatcatagagtgccttgcagactgagaaagcttcgacaaagccatctagagtcttcatgtctctcaggaaggggcctgcttagtatctctgccctgctcagtcattggctaagccacaggaagcatggctgcagtgaaaatccaggagtggattcattcacagcacagcagctggggtccttgctcagttatactcctgatagttggagttacgtgagattgccacaaagatatttggatcttttacaatactcagcataaggtaggcagccacttagtatatggcttttaaatggggggaataaacaaacattggtgtgatttttggacatctcctgttgatcaatataaagagaaatattgtatagacaacagagatccacaggtaaataaaatgtatacaaatattatcttattaagtattataatatgaaaagagaaaaacaagcttgcatgcagaaggctagagaggcacaatatactcttaagttttaaattatggttttcatagtgaatcatactagttattattgaaacgttacagttgtctccctttgttttgagaaaagtgttgagggttacctcttctgtaagtaatttgactgttaataaattagttaacttatctaaacttccacatgttgaattacaaaatagaccataatacctgctctgcctttttacagtattctagtgaggcttagattgaattttttttaaataaatatattaaaatgattcgtaacatgtaaaataccctgtcaataaaagttataattcttattaccataatctgtatgccagactaaaacattaatagttatgtgatcagttattaaagggtagaaagtcacttcccatctccactggtaccacccacatcacagcccccatcatttctcacagaatagtataccagcttcctaaaagagtcttgctgcttctactcttatcctaaattccggcctccacaccaccgtcagagtggactttgacatcttaaatcagatcgtggctgtttgcttaaaacatttcaatggcttctcttagcccttaaaataaaatccagaatctttgtacaaatcatgtcagcaaacagctcctgcctgtctctcggtcctcatctcattctactttacctggtaccaataaggccacaatggacttctctagattcctccaacctgtggcctttcaataactgttcttgctggtaattttcaggcccttacattcaaaaagaagaaaaagaaaattgctgctaatggcaaagtttagataatgcagaaataattatgttgtcatagtggttttatacttatggaagtttatcaggtgttagaaaatgtatgtggcagttaaccaattaaactatgaaggagtggtcacaaattctttcctcctgttctttttggttaacagaagatcttatgacttttaaatcattcaataaaatttatcctcttctgtaatatttctgaaagaaaagcgataaaggatcattctttgttacagttgttgggatctcattagttacaagtcatgaaatctcgagataatggaaaatattttatataggtcagaaattgcattacaaagagcagtgggtattatatgacatatacatgacctcagaggaatacatttgtaaacatgcttttctatgtaaaattaatgtgttaatttaaatgttaaaatcatgtaactcatgtaaagtgttaatgtaaacattaaaatgctgaggtgtgatttcttcgtagctgactcaaagaaaactaaaaaacgcttccctaccccagagcactttttatcagtgtttgtaggatttgtgtctacaactgctattaacatgagtaagatttctttttttgagacagggtctcatactgtcatccaggctggagtgtagattcactgtatccttgaactcctgagctcaagtgatcctcctgtctcagcctcccaagtagctaggactataggcgtgcactaccacacctggctaatgtgtttctgtttggttttgtttttaaagacagggtgttgttatgttgcccaggctggtctcaaacttctgggctcaagtgatcctcctgtgctggccttccaaagttctgggattataggtgtgcgtcactgcaccaggccacattaattggatttaattgagtagatctctgatacactgattgaaaatttactcaagttactataggcagagccaatcgggggtataattcatagtaaatttaaagtgttttacattaaaacatgaaatagaacatattaagaagttggctctataaccattttgaagcagatattaaagtagttttaatgttagacttctggtattaaataaaagacaagtttataaacagttcagtaattggacaggctccatattgattttttcctttgttatataatattacccacttctccgtccagaactatgtcgtacagggtttcagagtgctagaaacatggtcgctgttgtgtattggaatgttggaatgtgcaaagactgaaaggctgtcacagcagtcaataagatctgagaggtgttgactaattgcctgctaattacacagtaaattgtctaattaagctgatggttaattagggtacgcttgcacagcagtcttgtggaatttgtgtctgatgtctgggaagcagcttgtataattggcaaactggtaaggactggcagagaacatgactggaaaactccctgccagtggatgacagaatacggatttagtggaaacaaaagggttgtcatttttgtactgaaggttttgtttcagttctgcagctattctgcagtgagcaattgagaaatgcatctgaagcctaaattacgtgagtaaaagaaggcttaaaatgtgtgtcagaatgtaaaatatgctgcttgcgtggcatgtatcacctctgatacactatctcacattatattaatctacgccttgtatgattctacagttcctccttttaacatatatatttggcaaaaaataaaaaacgataatcccatgcatctaaaacaatgcctcttttatgaaaatataagataacaaaatgactgattagaagacatttgaaataagagctttgaattcattatttaattattaatttatatatcactgtgaatcataaaaatattagacatgatacaaatataagtttggatgatattttaactgagtaaaaattgtatttgtaatgagagcattttcattttactgtttatgcagttttgtcatgcaactggattttgcctgtagtttaatttgtaagaaaaaatatttcaatacataattaaatgtatttgatttctgtgtggatgtgagtggtgtttgatgaattacctgtaaaatttgagtgcctttaaaactaaaagttctagaagtttgctttgttgtttttattgttctttgtagctgaggaagtttaacttttcatttcaataagtcacctatggctgaaatactaacataaaaattcaccctgcaaataaattaaatgaatccattggagaatataggtcctttacagatgatgttaggtacatacacattgcctcttcataagagacctgaatgtaaatgattgcctctattaccatttgccacccagattcatcatattttgaggattttgcaataagactttgaatagaacattaggttgcagttgtaacaaagaaccacaagttcacagtgacccttggattgacttacactattgtgtaaataaaacttgaaaaacttttcagtatttccaaactagattactaaataaaaattgtatttgtaatgagataagaaggcctaaattaaattatagtatcaaaaattgttgtgactttcttattaaataaaataaatttccctttgttttgagaaaagtgttgagggtcacctcttttgtaagtaatttttgtaagtaagtctgtatgtgattagatagatatggatgtttttttgttcccgctgttctccaaggagaatttgaagttgtatatatactatatatgtttttagatagagagaaatacacatcatgcagtctctgaaatgtctttgccttagcattaatcttggagatatatgcatagtaaatgaaaatatttactgttttaacacaaaaggtgtttttcaatgttctaaaatactagttctcagacataaaaatggatgtaaaataaaaatatttatttcaagaatgtagaaaaattatattcattccatttgaagcataggttacaaagtcttggaagacttcataaacaaattattcaagatagcagaaaaatgaatttaccaaatttaccaaaggaatacaaggctaaacaaacagaaatttgttttatttaaagatatattctgttttaaataaacagaaattgtttatttaaagatatatctcctgagggagaaaaatcagatagaggtcagtgctgtaactccaacccatctatattttgatccactcaacttttcatcttagtcctcatgaaaataacttttaaagttatttattataagttataaaggtttacataaaagaaataccaagtagatctatcagtgaaattaaggtcttagagaagaactctttataaatcataacttttaagaaaaaatatttctttatgtttacaaataaatttcaatgttgttttctattaaattttaatctatttcaatacattgtatgttcattatcactaagaataaatttctaatgttctaatcacaaaaaatgttaaatatttgaggtgatggatatgtttgaggtgatatgttaaatggtttaatttaatctttccacattgtattcaaaagtcatgacaccactttgtataccataaatatatgcaactataatttgtcaatatataaaaaatgtaaaataatttttaaaatgtagctggcttccattaatatatagccatcacaagagtgaattctgtatatcatgattttatgcaattatctgttgagaacttcatgtaatactttactttggcttttaaataagtacacacacacacacacacacacacacagagaaagagagagagaggcaaagtactgtgtgtgtatatttagtgtaaagacagtttctcttttaaccacttggaaagctttatccctgtaatttaaaaaattcagaatacgaaaatataatatttagtgttcttaaccatcaacttcatctccagaattatttgtttttataatttacgtataaaatccattctttaaagtgtaacttttcatggtttttagtatattcacaaatgtgtatccatcatcactatctaatttcaaaacatttctatcaccctaagaaagaaactccatacccattagcagttactccccattccccacatcccgcagcctctggaatccagtaatgtattttctatctctatggatttacctattgagtacatttgatataaacaaaatcatataatatatgactttaatgtctggtttcttttatgtatttagtataatatttcagggtttacctgtgttgtagcatttatcaatgtaatgcttcatttctttctgtggatataccactcttgtttatccattcattagttcataacccttcatggggtatttttctacttttacctattataaatatttcttcattcatatgtaagttttgaggggagatacatatatattcaattccctttggaatatagttaggagtggagtttctgggtaatatggtaactctatttttaactttttgggaattgctaaactgttttccaaagcagctaccccaatttacattctcaccagcaatgtatgatatttccagtttcttcacatactcgccaacattgttgtttgttgttcatcttttttgttataaacttcatagtgggtatgaagttgtttcccattatgatattgactcctagtgttattgataagtagaaaaagtaaaaatatgaaggcctaataatttccttaatattcttattaacaatcattgtggcaactggttaatataattgacagttaaagtagcttccactttccatatttttttccccttattcagaaagtgtggtcatcaggggcaatttgacccagttctgttagaaacatggtgtaatagcaaatctaaaaatagagttttggagttacaggcaacttccaaagaatagctagttatataggttctttgccgttggaagaaagtgttacaggatcatctatattcaatgagtagtctcttactgtttatatatagttcaaagaaatgaataaatattcctagctaaattttgagcaaaacatacagaattagaagccaaaaggaaagcatttaatatactgtagatagcaaggagaaagatcattactctaggagtctgaatcaattgtcgttccctgctcacttctgccctgcttggtaattttatcattctagatataatagcacagactgtgagtgttaaaaaaagacttgcctgagatctagcttgagtctaagagctttcatttacagataatgaaaattattctttaatcaaaagatttgttcaaattcatttggatggcaatagagtgctcttaaaccacatacttggcccccttagcattgtatttttatagtattttatactctgtgtaatttgtttgttcatttttatagatcatgtattgtataacaataagatacaatcctggttctcagagaacctaaaatctagatgtgatgtgcgtgagaaaacatgctatgagagaattagaaacgaagagctataaaactacagaggaagcaccaaaccaagctagagcaaggaatgccattggaaaaaagatgataccaaacagttgccctgcatagtgcctgtccaaagaatagagaatacattatagatgaatatcatgagcaaagtcagagagaaaaagaaagccccgtaaaaatgggtgtttactttcactggaaggatgatgtagtgagaataagaattagaatggaaccacataataaaggcccttgtttgatcatcaaagagagtttgaactttatcttaaaggataatgaactatatgcaaagaaggataagacaggcttggatgtgcattttagagaggattatctgataatagtgtagaaaatagtcacaagagtgagagcagatgaacatgttcattgacaaattatttctaggcaatgtgcttggatgttgaggatagagtggagaggaatataaggccctaaattcatggagcttacagtgtaatacagtaaggaagaaaagatattggctcaaggttgtatctagagcaaagtgaacgtatttgacatgtataaaagagagtaaagtagcagtcctggtgactgattgcatgaggctagatatgggaagagagaagttaggaaaaactctggtatctctgacttgccagctgtttattgttgttttgcaaaggaagtgaacataagatgagaaaaacatggttactatgttctgtgcagttactgaagcaggacctttcaatatcaaaagaaaactgtcaataggtacttttattctccaactataatgatgtcaaatatttggaaagaaaaggtcaacctaataaaggacctgcagttattaaaattgatctgaaaatgttaataatttttcagatgtgatataggtactaatgcagagttctaaatttcaaattctatttaattattctaaaattagatctaaaactaacatagaaaggggaaaagttaaataacagaacaggatgttaaatcaatatgattaattaacttgatataaataacttgagtattgctatgtttatctgtaaatcatttatcatgataccagctgtaaaagaaaatcttaataataatgataatgatgtgtgtcatcctcccacccagcagaggtgtcatgacaaattgttaacaaactgtcttacagcacttcacagattcaaatgctaatgtaataataatataatcaataataataaaatcaacaatataacaaaccattttgatgtggcttgggaagagaaatttattaaaacattgagttcacatgaataaagttgaaaaacagaatgatttacccttttaagtctgtatttacattttgacttttaactttcaatgaagggaagagggagcacaaagaaaggacactgcctgaaactcttaaaatctgatttctgtattctttctggacattacagaaattaatctacatattttcatccaactgtatctccccaaagtatgttttgacatctctctctctcctgcttatctgcaggagaaaggccataaatcttagcatgcctacaatgccctctctcatcttaactttctcttagtcttaattcctcccaccaacctcttcccataaaggagacacaataacagaagccttaacatgtttaaaatatttgtccctttggaacctgataaaatttctcagacttcacatgatgtttttgttattcaatccacaaactatgattgtgcacatggatgcgcaggccgctcattactcaaggtaaaactgcctgagggtgccatgcacagtctctgaagatggcttgtgcttttctgccccagcacttgtgcatgcattgtgctcgtatctgaagagctctgcccagtattttgacttttgagaatacaattcatcctcaggagccggcttagatgtgacccaccctggaagctttcttttatcttaaaattatgtgtgtgtgtgcgtatgtgtgtgtgtgtgtgtgtgtgtgtgttttcttttttgagacaaactttcactctgtcatccaggctggagtgcagttgcatgattacagctcactgtagcctgatctcctgggctcaagagatccacccgcctcagcctcctgagcagctgggactacaggagtgtgacactatgcctggctaatttttgtatttttcatagatttggggtcttgccatgttgcccaggcttaaagttgtgttcttataaactgtaggagtcctagaaccgcctgtgttaagaggaaaaagacagaaattgcaatgaaattgcaaatctgccactaacacactatgaagccttttaaaatgagataggtgaaccagctatcagctcttttcagttctatcatgctaaatttaaattcttttttttaagctgagcatggtggcacatgcctgtagtcccagctaattagcaggctaagatggaaagatcacttgagcccaggagtttgaggatgcagtgagctatgctcgcacctctgcactccaacctgggcaacagcaagaccttatctttaaaacaaacaaacaaaaattaaaacattttaaatttttttagagttatctgtataccaggtccattttcctctgtgaaactagcattgggtagttattgtgtatatattatttgtcaagcatttcgaaagccatataatttacattttctcttttactactagcaactcactgtggtagatgtcataatctccactgcatggataaactgagctttaataatttcgaattcctctcttctgtctgtccctacagtcatatctcagttccttgaacacagcagatactcaacaaagactgagttgccctcttctatcttgttagagttttttgcttccagatggaaatgatgtgatttatcacattatagaaatcgatcaataatatttgtgtgctatcattttgctgcgggtagaatttaggtttctgtaggtttttaagaaagaaatgagaaacttgttaaaaggtttgctgtgggcctctttttaattccattattttagggcaccagctttctcccttttgagtcccatagctcatgggaccatgtttggctattcattgacaatcattgttttgttttctccacctccctagtcttccctccagtaagatgttttacatcccatgaatcataattcccagttcttggatgaaaattgctccacctgacattaaccaagtttactagcaagatcctgtattaggtagagcaaattcaaagccaggagccctatggagaaggcaatgaccctgatctcacacctttacttcttaaatctttaaagacaaaaataaatttcaaaggcaatgaaaaagttttttctgatttgaactcctctgggctctggatttccatggcttccttcatggcttgtgttttagtacagtggtatgaatatgaaaaccgttagtacgaggggattatcctctctccagtgctctctgcaatattttaaaggtgtcccaacattataggttgcactgaaataagacagcctacttggtattacattctgtattcatatttactataaaatgtcttgctagagcatattccttaacttcctgtagagaaggatgtaatgtacaacagagaagtgcattttttagaaacactgaaatgaaagttgttgattttaaaagacatcttgtcacagatgagtgagggagaaagagatcaaaccagcaagtctagccaatccaacgtttcattcatgcatctcttcggcttagtgctttccccttcggtatcattagcattttcatttcgaaaaatgacagtctgcagtggaagcagtaaaaatgttcaacctgtggtttaaattattgattttttagaatattgaagcagtatttcaaatggattttgttagagatacttctgggtggggggtttcaaaggtaatttgatacccaaaagcctgtatatttcaaagagtttccatttttttgaatttctttagactctggatgattggataaaaatgtttattatcttcaggattgtaagtagcagatcattgctgcttgaacttgaaacatatatttgcagactgtgctcttcatgatttattgtgcatgctcattctgtgatcaactggcaaaataaatcttcatttagaaacaaaagcattttaaaataatggaaaagatactatgatctgcatacgtggaacgtcaatagtccaattgatagctagtttactgtaataaagcatgcaagggtggttctataagaatggattttaatgaagttcctcaaattgtgttatgtgaatagggagtagagtgtgaccacagagattttccttaaagtcattttaagtctctcaccacagtcaatacttacatatgaacagaaaatattttgacaaggaccaggattactgactgctgtgtgtatgctgtgcaggtagtttgctattcgcagcatgtttctccttatggaaaaaaagctacttaaaaaattacattatatcaaaatgccttgatctgcaatcattccacaagtccaagccctattgaagtcaatgagggcttggagtacaaatttatgactatatcgagcttaatatgtggagatttgcactatattttgtaatgtcaaatatcacatagcaatgagatgacacaaatttgaaataaaacctgatatccccctttgacaagtggaaatgaattaaaaatacagtatcagaagagatctttttgaggcattgaaacataaaagggaaacctgccgcagaatacatgagatgtatccataataagccctgtaacatttaaaccaacttgtaaatgcctttccaaaggcagtgctaccccggaagttggttggagaattgctgaatttgctactattggggaaaaacatgtttaatatgatggtgcaaaaccgtaagatcaaatctttttgtatagcaacccccttttcatctaaaaactttatataatagacaatatgattaaaatagctttaacagcctttagagatagaagttttaaatattttcatattgtttatattgttatttgttgaaattttagttaataaaactgaggcccagagaattaagtgtactattcagcatcattcagctgttaaataaggaagccagcattcttccttggtttgtataattgcagagccagtgcttttctgctacacaactctgtttcattaaagatgtcactgaaaattggcctcaaaatcagcttaaaaaaggaaatgaagacacagaaaagcagtgagccctcatggttacgtagtatatacaaaaattagttatttttcagtttcaagggtgaagccactcctatctgcccccttcctcattccattaggtgcttccctcatttaaaactattcctgtgcacttatatcccaggcaccatgaaggaattaactcactgaacctctgcaacaaatctatgcaatatatattctattcatattattattatatcttatattattagtggtatataatatacaaatatataataatatactaattatattatatataatatactacgaataatgtatattttattatgtagtatctatattatgaaataatatatcattaggttaatatattatatattaacaaatttttacatatttatatattataaatatttttaagtcattagatcattttatgagagatggaaatacaattgcaaattttaatcttagaagtatatgcagaattttatatgcaatgtatatattcactatttagttacatcttttaaatactaagaaaaatagcaaatcagtagcttactgcagaagagcaaatgtagtaaaataagtatttagtgaaaggtgtagccatcttctaagcttgaaaatcagttttttggtttttttttttagcattacatttcagggcaatagtattacaaagtctgaatcttaatttattcagagaagaaattaagttgaggaattccacctgattgcagatattaaccagttgttggcagtagacttgtccactcatgttatgcttcttgaaactgtacacctaagttcaccttctggtgggggcccagatgtaccaatttgtgtttctattttttcttttctttctcttttattctagagattaaacatccaacattccctgagatgcatcctctttttgccttctctctgcagcctctaaatatgaataatacatattatattattaatataattattagtaattataacacaatatactattatagtatataattagtacgttatataatacttatacaattattagtgtgttatactaatatataattgtaatatatgtaatatatatgttaataatatatatgataatataatatactatgtaatatataatatattatcagtatattctatattatattagtagtagtataataataaaggatgaaggtatgagacagaatggttgttcttgataaaactgttagtaagcggtatagcagatgagatttctactataaggaattgtcaatatgcagtgagttgatgatgacaatgacagcttatggtgcatttattatgtggcaggcagtattttaagcatctttcatataccatttcgtgtaagttttcacaatagcactatggagtagaggtagtataattattaacactttacaggaaggaagctgagtcacaaaagggttagtgacttgcgcaaccaggaacacattgttgtttatttggtgtaatgatgaaagtactaaatacatttcttagcctctagtgagtcctcaaaaaatattataggtattaatgttaaaggctatttctagagcattaataaagtattaatacttgttgaatgaataactaatgaataatcccacctctgcaatttattagctatgggactttgtgccagttttatttaaaatgctaagtttgttttcttatttgtaaaattattataatgaaataggaatattgtaatttactgagttcatgcatgtgtcaagtactcttgtagcatgtaacagaagtaaaactttagcaagtactcagggcatagtaagtactcaacaaaggctatcattgttaatgtagtttttcatccttattttaataggacaggagtaaccaggacaataaccataggtcaaggctgtggtgtgtcctggtgtaagtgtaccatgtgtattgtctaccacaaatattgatgttgataaaatttgccaatcttatgaaaattttccagtattacttttattcctttgtatgtgtgtgtatttaggtctagacagttttatcacatgtagtaataataaggatggaaccctctgggagtattgtgtatagatgagcatggctggtcaacattttcctacctttattgtgctaaattcatccattctttagatttgagctttttgccttaacttcaaggtaggaacatgagctcaggtgttaaacctggtgcgcttgcttaatgtagcacataccaaaaattctgtggttccgtgaaaatatatttttcctcacaatgattactcctaaaaacaggattcctgatatcagtgagtgtaaatagtttaacaaagctatgggttgtctcttcaactacattttttgtactcaaatagtggtgatgatgcaggtcaggcaagcccccaaattggggctcagcccgggagggttcttggctttgcctaggaatgaattcaagggcaagccagaggtgttagcaacttttactgaagcggcagcatacacagcagcagaggtacagctcgttgtggagcagggctaccccatagagagtgtgcccagagcagcagctgagaggcagttctgcagtcatatttatacccacttttgattacatccaaattaagtggcagattatgccgaaatttccaagaaaagggtggtaactcctggattgttgggttgttgccatggaaaggggcggtaacctttggctgttactatggcaatggtaaactgacatggcacactggtggacatgtcttgtcttgtggaaagctgcttctgccctggccctgttttagctaggtctcaattgggtctggtgtctgaaccctgcctccagagttgagtcctgcctcctacctcagtgttacctagttataggcatgattcttctgacttagcacttgtaggttcacagtaatttgaggtaagcttatgaagtacagattaaacttacaagagcacaaatattggattaatataatttgccaatcttatgaagatttccctgttttacttttattcctttgtgtatgtgtgtgtatatataattatatgcagttttatcaagtgtaggttcatgtatttaccaccacagccaagataaagaacagttctatcatcacaagcaaccctcacataaccttttgtagtcacacttacttctgtcccctcactctctgcattcctaacgcctggaaaccataatctgtcctctatctctaaaattttctaatttcaaaaatattgtataaatagatttatacaagtgtaatcttttgaaattggcttttaaaaaaaataagcatcatacccttgagatgcatccaagattttgcctatgtcaatagctagttccttttttttttgctgacttgtattccatgctatgtatataaccacaatttgcttagccattcacctgttgaaggatatctgggttattttcagatttttgttactacaaataaagttgctatgaaaatttgtgtactccttttgtttggacataagttgtcatttctctatgataaatacaagggagtgcaattgatgggtcatatggtaactatatgtttaatttgattaaaaagtgccaaactgtttttcagaatggctgtaacattttatattcccacaagcaatgtataagtgatctagtttttccacattcttgccagtacttaatatggtcacttgtcactatttttaaaaattattttagcagttctcttatgcatgttatgatatctcattgttttttcttgtttgtttgttttgttttttgagacagagtcgcgctctgtcgcccaggctggagtgcagtggtgcaatctcagctcactgcaagctccgcctcccaggttcacgccattctcctgcctcagcctcccgagtagctgggactacaggtgcccgccaccacacccggctaattttttgtatttttagtagagatggggtttcaccgtgttagccaggatggtgtcgatctcctgacctcgtgatccgcccgccttggcctcccaaagtgctgggattacagatgtgagccaccgcgcctggcctcattgtcattttaatatgaatttctctaatgtgcaatgacattgaacgtcttttcacatgcttatttgccatttatatatcctccttagtaaaattcctctttctccatattttttttaatttaaataaatatcctggaggtcactcattaatagaatataaagatatttctttgtctttgtttccactggtgtataattctccattgtgtggatataccaaaatactataatcaattatgtatgaaattggtcatctttaatttcaaatgggtcaataaataaatatccatgtttaagaaaattaatcgttttagcattttatttcttaaaaagtatgtgaaatatgacctaagagtacagataaaatgattcaaagatgactaatctccaaaacatcttatttttaatatttgcatggctatttctgatttatctttttttactcattaattaatgcttgctattttaataatgctatttagtgactttgaaaaataaacaagttgataacttatggagagaaattctgtatttatgtttagaaatagcttatataaaaaagaaaactttactcaattctaggatttttcagtagcctagtgttttaaaaactgagttataaacccatataataaataagaacaaaactaaaggtattaatgaaaatatcccaatgcctttggagttttagaaattctgaattaatcataaatttgtataaaatttgatttggatagcactaacagtgatataccttcccattatttacagaatcattaaagttgaaggattctaaattaaagtgatctatctgagtaatggatatgaaatgagtaacagtctcttaaaacaccaacatcttatactgatttatgtgatataaattctatactctctacccataatctccatggcttaagttctgtattatttttccagtcattagaaccatgaaacttatgaacgatctgtcataaagttttggaggccccaactttcaacaacaacaaaaatgtgcatctgttatttcatacgtaatggagtatagtacaaatgaaaaattgagtgttctcttcagcccttaaaaactgcaaaatggaaggccaaaataatttattaatgtactcaaatagattctatccttacatattttacaagtaaatcacaactgaactgttatccatgaactttataaatttcaaaaacaagcatttaaaaagattatactttaattagtcactggatagacaataacaatgttatgatgtgcctctttaaaattatgaattgtcacataatctgggtatttggggttgtgcattagtagtaaaatcctttaactaatacattgtattaacttcctgttaaacatagtagttttatcatacttcatacttattctcccaatctctattccatgtcaatattgcaatatcattcatttaaatattgcaatatcaattttttaaaactacagtatatatgcaaactcacaatgacaaacatatcaggagattgaacatagtaaaggataccaacaaaatattagaagacagaaagtgagtgtactaattgtaagttacttagccaactgcagatatctgaaactatctgggggcagccttgtagttgcttcaagtcaatattagctgaagaattttgcagaggatcggcaattatattcctgaaaatgaaactgaaaaatgaccacatgtattttaaaatgaaccaaataaatctagaaatcaaaattaataaaaaaattcaatgaattgattaaatagctgaagagaaaaatagtgatctgaagaaaggagatagaaaatatgaataaaatattaaatgacatggaaaatacaatgagaagttctaaaaaagagtatgtcaggctgggcacagtggctcacacctgtaatcccagcactttgggaggctaaggtgggtggatcacctgagctcaggagttcgagaccagcctggccaacatggcaaaacctcatctctactaaacatagaaaaattaaccaggcatcgtggtgcactcctgtagtcccagctactctggaggctgaggcatgaaaattgcttgaacccgggaggtggaggttgcagtgagccaagattgattgttccactgcactccagcctgagagacagagcgagactctgtctaaataaataaaaacaaacgagagtatgtcagagttctagtaaataaacaaaatagggaagatccaatacaaagaagttagctgagactgtccagaaatgttgaaagacctaatgtatacattgaggaagctcaatgaatctcaaacagaataaatgaacagaaactcctcattacactcatcatagtgaaataacagaaaatcggagacaaagaaaagcccttaaaagtagtcagaaagaaaagagatggcttaaggaaattccttgacataaagacagagaccacaatagtctaacataagagatgaattcatagttacctgagtgaatacagtgagcggaaaaataatcagtgcagagaaacagtacaatatactaactccatgaataaaaatataatgctattacaattgacaaatcaaagaagaaatattggaagttaaaactgtgacagtacaaagtaaatatgtattttaagagttggaagggaaagttgtgaacatctttcagaaagaagaacaaaatgacagaactgaaaacaggaaagaaaagacaggaaaaatagagactgtgactaatagctccatacctttaaaacagttgtgctacatggagaagtcagagcgaataaagaggagggaatttccaacaatataaaatgagaagatgtccccagaaatgaagaacatggtggccacaaaggcacaatgaaataagaaagacccgcaccaatatttaccatcttcagatttctaaacatggatttaggaagatcctagaaaattctagagtgaaaataagcaagccatctataaagaaagcaaaaacccaaaaaagcaacactggaagttagaacacaatacttctgaaaacctaggggaatttttttgtttttgtttttgtttttgtttttgagatggagtcttgctctgtcacccagactggaatgcagtggtgctatctccgctcactgcaacctccacctcccggcttcaaacgattctcctacttagcctcctgagtagctgggattactggcacaagccgccacacccagctaatttttgtatttttagtagagacggggttttgccatgttggccaggctggtctcaaactcctgacctcaggtgatctgcccacctcgtcctcccaaagtgctgtgattacagacgtgagccatgggacccagttggaaattatttttagttttgaattctataccaaccaaaatatcagtcagatgtcatgtcttagttcattcactttgtgcttctacaacagaatatctgagactgggtaatgtataaagaagataattttttttttttcacagttctgttagctaggaattccaaaatcaaggaatcaccatccgctctggtgagggccttctttctgtgtccttatatggcagaagagagaagggcaggcaagctagctagcccaatgctgcttgaagcctctttcagccttttttataagagccttaatcccattcacgggtaaggagccctcctggcctaatcacctcttaaaagccacatctctttttttaaatttttttttaggtccagaatatatgtgcaggatgtccaggtttgttacataggtaaacgtgtgccatggtggtttgctgcacctaacaacccatcacttaggtattaagcccagcatgcgttaactatcttccctaatgttctccccaccagccccaacaggaccgagtcagtgtcgttcgcctccctgtgtccatgtgttctcattgttcagcttccacttataagtaatactatgacattggcaacacctgaattttggaaaggacccattcaaaccatagcaagggcagataaatacatttaccttccatgagccctttctcaggaagcaactggagagcgtgctcatctgaaacgagtaaataaatgaagaaagtgaacactggactgcaccaaaaagaaattctgataggactgcaaaggaaatttgaggctaagaggtatgcagtataccttcagggcagtctgggatcaggtaaccaagagctagaaggaatttctccggaaacagagcaaactgctcagttatctgatagctttgactttgtggaaagtcagattatgagccattttatgaagttaccatggtatgtgggaagacagcctgtgattcgggaaaagtcaagtaaatgaaagaacatttaagttggggtgagagtgaaatgagagagcggtacaagaaatgagattacagactgctatttggttctgttgtgaccaatatttatatagctacaaacataaaatataatgagtttagatttaactgaaaatgtgttaaatattttaggaagttggaggagaataaatttgcttgagaggttatataaaagagctgaaatcttagcttccatcataggaagttaggggcaaaggcagaggtggggtgaggtggggtgggagtgctttctctgtacaaaagtaactggcctattctcagtatccacaatcaacacagaaatgctaactgttctctttaatggctactcgtattacaaaaactaaatttgctgtctttgattcccaatataataataaaagtgcttccttattatcactaatgaaactggcctggatgtatcattttatccaaacaagttctttagccatgtgtacctgaatctgattcagcccttacttgaagaaaaaaggtagaatttaagtatacattttctgtgttagcactcacatggaaacggtatctttccttcaagttcttcattcttaataatctaatgatgtcagtcaatacttatagaattgtagcaatcttaaactctagtggaaaaagaaaaatacaggtgtttatgatgtgacattgattttagcagttcatccttagtggaaaatgtaattgaatatgtgttcagatggataacaccactttaaaggaggaataagacagtttaatgcaatgggaagaactggatacatccacatattaaataactgtatagttcactgattgacagtaagtctttatatctaggatttgttatatataccccttagactcctctttcaataccagcactacgcttgttcaattgttgtcaagttgacatataatatactttgttataacttttaatgtaatagacctttcttctccactcccataggagaagataatgcatctactttagtaaaagtaatctaaaaaaagatactttcaatgcaacgatggtttataatctactatcagtgcattatatccttctctagaaatgtttgtatgtgtgtgtctaaatatgtgtgtgtgtgaatgaacacacatatacagagagagagagagagtagagattataattttctgaagaactggtaatttaaaatatttatgttaggcaaaaatccatgccaatgcagctatcaattatgaaacattataaccaaaggaatcatgacttttaaggaatagcttgaattttgtcatttttagtattccaatttaaaagttgtattaatatatttggttttatttttctgtttattatctcataatagaatgtaaaacagataaaggaaaacgctttggtattattaactcactttttcaatagctgtgtaattctcagagtatggattatatacagtattatttgcttaaccattacttttttgatgaacacttgggttttacaatttttgtcactgtgaaatgttcatattttgtttcctatactataatttctctagaatagactcctataagtggaattactcatttaaaagtatatatattttcaatgttgatagaaactgaagataaatttccaaaagtatctcaacaacagttcacacactaaataatataagatagcatccctccctgcctctacctccgatctctagcactggatgttatcagtcttttaaaatttttgtcatattggccaaataatatgtgcaaaaaaaaatggcatctcatggttcgttcacatgtgcatttttctattagtaaggttgagcgtcctctcaaatcattacttacatttttctttcttcttctatgaaactgtgcacatcctttgactacatttctattgaattatttgcctttatcattttaaggagtacttttatacatagaagatagtaatctttaacaaatcagtttttcatattacattgtctttcagctttttataattttttttctttttgttttttgagatggagttttactcttgtcgccccagactggagtgcagtggcatgatctcggctcactgcaacctccgcctcctgggttcaagcaattctcctacctcagcttctcaagcagctgggattacaggtgcatgccaccatgctcggctaattttgtattattagtagagacggggtttcaccatgttggccaggctggtcttgaactcctgacctcaggtgatctgcatgcctcggcctcccaaagtgctgggattacaggcgtgagccaccgtgcccagcctttttataatattttaaaactaaaaacttcacttctagaaaagtaaaatgtacacaaggttaaacattaaataatgccaaaaatattttgatgaaattcagcaattccctgcctcgtcttttcacattcttcttccttgatcttgttaagctatacttgcaattactatgtttagatttgtaaattcatgcttccgaagagtatgactacactacacttttttccaatttaaacattttctattgacttcctgttatacataactatcattagttttttctatattttacctgatttgttatgagtgtatatgttttttacacataattccaaagattctgtcagtttccatcggtcatctggagacaagtctttcgtattccagaagtgtacttcatttctgagtactcaaattactttatgccactctccatgtggcatatttcttttttttctcagtttgatattttattttcctaaaaccagtcatccagagattgttcaaaagggatgtatagtaggtatatttttagtatccttatagatttaaaatttctagagtaaaaaaaaattatttttcttaaaaagtttcaacacattacaccttgctttctagcatttaatgctgctactgagaaatatatttttcaggcagaaagaaatagaagaaaagcaggaagatacaagttctatattagggaaaaaaagtttcccagaaattctcagattatttctcactagccagatgtaagtcaaatggtctctcccagctgcaagggaatttaaagcaagttttaaattggacacattgccccctaaataatatcaggatcccattagtaagaacaaatataggaatggatgttggataggcaatgaaaagtaactgttgaatttggtttcaccataatttatatgactaataccttattccaaacatacctcacaaacataccttgtttcattgtgctttgctttgttgcacttcacatgtattttttcttcttttacaaattgaaggtttgtggcaacctttcttcgagcaagtctgttgatgtcattctttttaatagcatgtgctcactttctgtctctgtgccacattttgataattcttgcaatgtttcaaacttttttagtactattatgtctgttagggtcatctgttacaccaatgatctttgatgttattgtaattgctttggagcaccacaaaccatgcccatataagacagcaaacttaaccaatacgtgttgtgtgtcttctggttgctctaccaaccggctgttcctctgtctgtctccctctccaagggcctccttattccctgagacataacaacatagaaattagaccaattaataatacaacagtgttctctaagtgttcaagtgagaggaagactaactcatctcactttaaatcaaaagctagaaatgattaagcttagtggaggtggcatttcgaaaaccgatatgggctgaaatctaggcctcttgcaccaaacagttagccaagttgttaatacaaaggaaatgttcttgaaggaaattaaaagtgccactcctctgaacacataaatgataagacatcaaaacagcctgattgctgctatagggaaagttttagttgtctggatagaccaaatcagcacaacactctcttaagtcaaaggctgatctggaacaaggccttgacgtgctccaattctgtaaaggctgagaggtaagggagctgcagaagagaagtttgaagccaacagaagttggcttatgaaatttaaggaaagaagagatctccataacataaaattacaaggcgaagcagcaagtgctgatgtagaagctgcagtgagctatcccgatccagctaagagaactgatgaaggtaactacattagataacagattttcgatgtagacaaaacagccttatattggaagaagatgccatctaggacttttacagctaaacaagaggagtgaatgaatgacttcaaaagacatgctaactctcgtgtaatgggcaaattgcagctgatgactctaagttgaagccaatgctcatgtaccatttggaaggtcctagggcccttaagaattatgctaaattggctgagcgtggtggctcatgcctgtaatctcattactttgggaggccaaggcaggtgcatcacgaggtcaagagatcgagaccatcctggccaacatggtgaaaacccgtctctactaaaaatacaaaaaatagctgggcatggtgatgcatggctatagtcccagctacttgggaggctgaggcaggagaattgcttgaacccaggaggtggaggttgcagtgagctaaggtcatgccactgcactccagcctggcaacagagtaagactccatctcaaagaaaaaaaagaaaaggaaagaaaagaattacgctaaatctactctacctgtactctttaactggaagaatgaagtttggatgacagcacatctatttacagcatggtttactgaacattttaagcctaaggttgagacctactgactccttcttgacaatcaacctggttattcaactctgaaggagatgtacaaggagattaatgtggtgatgtcttctaacacatatccattctgcacccaatggatcatggagtaattttgactttcaagtcttattatttaagaaatgcattaaggctataactgctatagtgatacctctaatgaatctgagcatagtcagttgaaaacatttagtggtgaatgggaagtatttaccattctaggtttcattaagaacagtcatgaatcccagcactttgggaggccgaggcgggtggatcacgaggtcaggagatcgagaccatcctggctaacaaggtgaaaccccgtctctactaaaaatacaaaaaattagccgggcgcggtggcgggcgcctgtagtcccagctactcgggaggctgaggcaggagaatggcgtgaacccgggaagcagagcttgcagtgagccgagattgcgccactgcagtccgcagtccggcctgggcgacagagcgagactccgtcttaaaaaaaaaaaaaaaaaaaaaaaaaaagaagaacagtcatggaaggaggtcagaatcttcatattaacaggagtttcaaagaatttgattccaataatcattgatgactttgaaattaggccaattaataaccctacagtagcctctaagtattcaagggaaaggcagagttgcatatctctcactgagttcaagtgaagttcaaaactttggtggagggagtaactgaagatatgttagaaatagcaagataactagaattagaagtgaagcctaaagatgtgacttaattcctgcaatctcatgataaaacatggatggatgaggaattgcttcttatggatgagcaaagaaagtagtttattgagatagaatcagctcctagtgaagatgctgtgaacattgttgaaatgttgactccaatattgactgaagttctactgtgggtaaaatgctatccaaatagcattgcatgttacacagaaatcttttgtgaaataaagagccaagtgatacagcaaatttcattgttgtcttgtttacagaaattgccaggcaccctaaccttcagcaaccaccatcctgatcagtaagcagccagcaacatcaaagccagactttccaccagcagaaaggttttgactctcagaaggctcagatgatcattagcagtttttagcaataaagaatgtttaaattaaagaatgtacattttttagacctaatgctattacacacttaatacagcatagtgtatatattttatacactgggaaacaaaaaataattgtgtgattcactttattgcaatattcacttgattgtgatggtctggaactgaacctgcagcatctcctaggtgtgcctgtagttgacatataagctgttttttttttagtatttttgttgcgataatgctaaacatggtatctgtgtgcacatatctttatacgttctatgacttatttatgaaataaattcctagaactgggattgtagttcaaaaagtacattttgtggtacttcctattgcctaattactttcaagttttccagtgtaaattctactaacagttcacaaagattcttatttctttatgctgctaccagtgcatagttttatcattaaattctgacttgataagtataaaattggatcattttatctctgattactaacaaggtaaaaacatttttcattgctttgttttttcatataaatttatactttgtgaattgttcatattttttatcattttctactaaaggggtcatctttttctcattggttttgaacacattttataatcacacatatattttactcttcccagcagcagttatttttggattttgattgatagtccaacccagaaatgtagcatcaagtttatttgtctttaaaaaggatctgagatgaatctgttacagcaggtacagtattaataaagtgaaagtgatgtggctctggcaccactttcagtgtccccagatgattctgcaccatagacttccatggtcactaggaaagggactgattgatgtagtctgtcagtttagggaaaccatcggctctgggatctatttactctttgttaccttgctagcccatgactcccctcagggttaggaatctagctttaattttctgatgtaactgtatctccttagttatagattacttaataatcaaactcaacaatgtataggtatccagtgagtagagtgtaacctcagcaggactctgatttatcttggatcaggtattaactttttgagttattgttgcaaggaggattaggccaaggaggattaggccaaaagtcaagtctttcacatctctgaggctagagcaggggtcagcaaaccaaggtgcacaggccaaatttggccaccagcctagttttgaaaataaagccttactggaacatagccatacccattggtttatattgtctatggcagatttcatgttacagttgcagagtagatgtgacagacagatccacaaagagtaagtatttgctaaatggctctttacaaataaaatttggctaccccagggctagaggaaaggccacaactcagccgttaatccttttctcccaatatatcaagaacattaatccatgctagctctattttgaatttttatttagtctatttttcttttactcattaatttgttcctttacttatttattaagtcatttatttattcatttattgtcactgtttttatacttaaaagttttccaacatttaaagttgaggcatgtgttaacatatgttttcttctacttcttctgttttatctatatgtttttaatatatctagagtttattttggtatatagcaaatcatcatgatttaactttgtttttcactaaattatcaattatcctatgtcaattgatgaataactcatatttccccattaatttaatattatagcctaactatatatcagattcaaacatgaatgaatgcccacaaaaatgatgccgcaatcattgccctgctgttttgctccattggtcttacagtttcttcttgtaacataaccatactgtttaaattactgatttttattacgtgtgctaatacatattattaacctttattacattttctcatatattattgacctgtgttcttctttttacattttcttaacttttctagcaactttcatagatataagatataatttttatagataaaagttggaattattttttcataattccaaaagtcaatgataggagtttatgtctgaattgcattttattaattatagaattctatataaaagttagatcaaacatttgctataattataacatatatctcattcagattaaataaaattgggaagaatattcaaaatgccaaaattaaatatctacatgcattttctacattatatgccaccacaagtttgttcttaaatagaaataacacatagcttctgtgtttatcatttattttttgtttctttattaatcttaaactgtgacagaaaaactgaaccttaagttgttattaaatgaattattaataagtatattcagaacatctaatatataattactaggagtaatattaatctgtaagtctgtattaagttgatttaatacctaaactctcttttcaaaggattttaaatatttaaacattattaaagacattccccagaaattttaaatgtgaaatatgtctgacagaacacctgatctgtatctaattgtaaatatatctttggtatgttttcatatgtttagttagacactcagagtatgtataatgggctatattggcatttacatttcattgtgttaatatttatatttacatttagaatacaaattaattgcatttctggtaaacaacattgttcatcgttagaatattttattgtagactttgtgtcattttgattaccttgcataagtatttaacttcttttttaaattcagtaaatgatttcattctcttttgatatacacccagaaataaaattgctggatcatacggtaacctatttttaattttttgagaaacttttatactgtgttttctttttcattttctttccttttttttttttttttaaagacagtttctcactctgttgcccaggcaggagtgcagtgagtggcatgatcatggctcgctgaagcctcaacttcctgggctcaagtgatcctcccacctcagcctcccaagtagctgggactacaggcatattccaccatgcccagctaagtttttttctatgttttttgtagagatggggttttgccatgttgcccaggctggtctcaaactactgggctcaagcaatccgcccaccctggcctctcaaattgttgggattacaagtgtgagccactgtgcctggcacatactgttttcaataatagctataccagtttatattactgccaatagtgtatgaggattcccttttctccacaccttcaccaatacttgttgtcccttgactttttgatactagccatccaaattggtgtggggtgatagctcattgtgactttgattgcattcccctggtgattggaactattgagcacctcttcatatactttttggctctttgtgaatcttctttggaagaatctctattcgagtcatttgaccatttttaaagagatacctgcactcccatgttgactgcagtattattcacaatagccaatatagaaaaacaacctaagtgtccattgatgaatgaataaaaaaagaaaatgtggtatgtatgcctacacatggaatattattctgccataaaagaaggaaatcctgacatttggggcaacatggatgaacctagaagacattatgctaagtgaaataagccagacatagaaagacaagtactactgtattgtatgatctgacttctttgtggaatttaaaagaattgaacttgtagaagcagagagtaagatggtagttgccaggagattttgggaagcaggttggaaattggaagatgttgattaaagggtacacacttacaattttaagatgaatatgttctggggatctaatatacaggatggtgactataatggcatatattgtatttttgaaatttgtaaaaggagtagatcataaatattctcaccacaaaaaaacaaaggcaactatgtgaggtgatggctgtgtcagttaggttgattatagtaatcatttcacaatgtttgatatatgaagtcatcacattgcatatcttaaatatatacaagttttgccagttattcctcaataaagctggaaaatcaattaaaaattcagtaaataattaggggaacattttatcctatatttttctctcattatggctatttaggttaatataatttgagaaaaggttatggttttataatcaaattcccaaagcttgtccttaaagatagatgtttactaaaagtgagtagtcacacaaatacaaagtatcagttggaagtgaacttacaggcttactggccatcatctgcttactgtattccccaatttgctgtcaattagtgccctggctaatatgtatataagttttgttttggttgcacaactgaaatccaagtgaaaaatatacggaggtgtccctcacatccaaataacagtaaagcaacttgcctaaggaagaaagtgtactaaaaattggaaccatgtatggactctttctcaggttgttgcctctgaacctatcaaaagtgatgtgcataggggagatgaaggtgtgacagaggctgcaaccaggtgggtgaaggagagaacaggcaattctcagaaaaggagtgctgggtagttaatccagtaggtgtctactacactatcctcaaaccctttagttaagaggaactcttcagagactggcaattgcctctttaaatagctttggatgtttgaaagtacaattgaaatgctttcgagtagtttctaattattgtgcacattatcccatcttaaggtgattcagaaaaatttaaactccctctctatgactgttcttcagataagtaaaaatagattttttgtatgactcttttccttatccaagctaaatatgcttgtttcttttaactgtttctcatatgacctgtctttaagtctctaaacctgtctctttttttacattttccacttaaagttttctagtttgccaaaaactgaaggcactacttcaaacatctctgaaaaagagggggacgggatgggcgtggtggctcacgcctgtaatcccagcactttgggaggccgagatgtgcagatcacctgagcccaggagtttgagaccagggtggccaacatggtgaaacccagtccctactaaaaatacaaaaattagctgggcatggtggtgggcgcctgtaatcccagctacctcgggaggctgtggcaggagaatcgcttggacccggcaggctgaggttacagtgagccaagattgtgccactgctctccagcctgggcgacagagcaaaactgtctcaaaaaaaaaaaaaaggaaagtgggacgatcacatcccatactaatttactgtgaaaatactcatttctgtcttgactatattgaaatataagctccatggtgttttattaatgttttcagctgataaactctactgtctctatcttgtagttgtgtggttgcagttttagaccccaagttacatgttaatttgttaaagtaagtccattgctctggtccatcacaacatctttttggatcttgattctgtatccaagatatttggtctccttcccggactctttgtttttgtttttcgggttttttttattccctgtcctgggacccccatctttgtttttataatttccctattgacccctttaaaacatattgaagttaaagacaatgaaatatgaaacttagagggaaacttgtttgatctcattatacataatggcatcagtgaagtaggcatataaggctctgttcttacattacgttttcagaaaagatgtatggcctagacctgttctgcattgttgttctgcattctgcactcacaatctccagctcaaatcctttcccattaccagatcaagcagtgtggataactaattcagaaacctttttttttttgagatgaagtcttgctcttgttgcccaggctggagtgcagtgatgcgatctcagctcactacaatctccgcctcctgggttcaagctattctcctgcctcagccccctgagtagctgggattacaggttcccaccaccacgccctgctaatttttgtacttgatggggtttcgctatgttggccaagctggtctcgaactcctgacctcaggtgatctgcctgtcttggcctcccaaagtgttgggattataggcatgagccactgtgcctggccctagttcagaaatcttataattcttttgtaggtctaactgtatcactaacatgggcagcttcagcaagttagcatttggaagccctcctaaagatcaaagttctcccagtatcctcgtgcagttatactgcttacagctatatacaacctctgaaacacccagcatccattcaccaaagataaagtatacatcagtattatattgcacatattacttccatagagagggtaaaaatgttaattcatggaagaccacgaaatcataataatcatttgtattgtgccacacattattttaagcactttaaacatcctttattttaccttatccaaactaaatacacttttttattttaccttatttaatggctgtgtcaattaatttttgagatgttatctctgactatcttcattttactaatgaggaaagtgaaatagaaagaggctgtttacttgtctgggtggcacagatagtaaaataaaagaatcagtatgtgaaacagctaatttgacttcattctcttttaaacaatacaccatactgccccatcatatcaaaaaaatgattcgaaaaatgcagggggaatgtatgaagtttatgagaatcaatatatacctgtatctcttaatctggtccctcagtccattggagcacctcctaattcctctcaataacatcaacacatttagcaaatatgatctgcttatgtctatattcaagtctatttagctatccatttgttatttgcaagaacgatgaaaatgacctggctgagggcttttatatattaggaacacttttccatgtgaatacacaatcatttaagtatttttctctagcctgtatcctccatgttatctaagtaaacaatcagatactttgcttccagttgttcagatacctggaatctttcacatttctctgtatattagatttgtagcaatttaaaaaaataagattactttgaaattacttccattacaaaattgatccaagacatcgtaacccaattataagatcataatatggtgttatggttagtatctacattctaagttgtgaacctttagtatagtttaattttatcagagaagcagaaacttatcaatatgctaatgaatgaatttcaacatactcttctgtatagctaatatgaaacagtgatgcttatacctattgttctattttcactaccagaaaattcagtaatattagaactgttttttaaaaaatcaactacaaccaaaaaggtttctgaggaaatactggcattttatttatttgtctttttttttttttttttttttttttttttttgcaattttagcttcccttagagctattttagctaacaagttggaattctggaaggctgcagtgtatataaatcactcattctttagcctttggttatcagagccatgaggttttattgcacttagatttatcagataaaaggcttctggagacctatgatgtttgtgtaaccctcacctaaatttgaaaataattatatctagtgctatcaaacattacagatattaggactatatttgttcctaatgagctggatatattaaatggctgttcctttcataccatttttgcagaaataattcctgctgataaacattagtggtgactatctacagagggccattaggatcacagagccagctctgataattttggagtttcctaaaaacttgtcaaaagtgcaatcatgttttaaataatgttttgaactctttcaaggaaactaatttttttggaatccattattatgcattggctagctgctgatttcttactgctacttattataaataaattcaagacttatgccctcctaaccttaagaaactgaatcattcatccttcatccttaaaacttagcaggaaaatcaaaacggtgtttcagctcaccctctgtagtcatctttggtcttcctctttaatctactccttcattcttaggacaaggagtctgcaaatgatagccccgtgggtcaaatccagcctcccacctgtttctgtactgcctatgagttaagaatgatttttacatttgtaaattgccttagtccatttgggctgctataacaaaatgtcatagatgggttagattctaaacaacagatttgtttctcacagttctggaggttgagaagtctaagtttaacgcactggcaaatttggtgtctggtgaaggcacactttctgttaacatagatgatgccctctacctgtgtcctcacatgatggaaaggacaaggggtctctctaggggtctcttctataagggcactaatctgatccatgaggaccccaccctcatgacctaattacctctaaaatgcccaccttctaaaactatcacattgataattaaattttaaaatatgaattttgaagggacaaaaacattcagaccatagtataaatggctggaaataaattagaagatttgttacatttgaaaatagtatgaaattaatgtaagtagcagtaagaaagcaacaactgattaatacatatatacatatggaagtcaaattttagtgtccataaataattttttattggaacatagacacactcactcagtaatgttgtctatgactaccttcctgtgacaatagcagagctgaatagttgtgacagagattatagtgcctgtaaactctaaaatatttatcatctgactctttaccataggagtttgtcaacccctgctctggacagtcttctcttgtcagggcagatttttatgaggttgcaccaaactaaatagcttcttttctagatctgttcccttcttttgcactccagaaaaatcttgttcagtgcccattgtgggttcagatatccctaaagcattgggatatggcaagaaagtttgaaaatatttatattatttgtctcttttattctgatttctatttttctaaatgttctattggagatgcaggtcaaaagtttgctttgttgatggagtacatgatcaaataattttagagaccattgacctacgtaaatacatcagaagcctgctcacctggctcagcaaggacaaacactgacaacctgatagcagcgagagagagtgaagcatttattgcagggcaccaagcaaagaagatcaggcaactcacatttaaatcctgacctccctgatggcttacagatgaggattttttaaagcaggggtaaatttcaggaaagcagaagttacaggcaaaattgtaaatcaatacatggaggtttcacattggttttggcctaaaagggcaggatatcatgaagcagggggcttacagttcataggtagattcagatgttttctgatttgcaatcagttaaggaagagaagctttgttttgaaatttgtggtgagcaaaaagaatgttagctctggctcttgggtttgactttctctaggtacctcagaaagaaatgcagaacaaagaactttggtcaaagttcagcccttagttctcccttatctgaggcctgcttgcaggcagatccattcggtggaggtacagatttccgaaaaacaacttagagacatattttatcgttagtttctatgagagaacgaaacatcctgtgattatagcttccttggctattgttttaagctactgttaccttcttgcttatcaatttgcttatttacttctcaaggctagctaggtgcctggaatttttcttgtaggatctcaagtttttcctttatttccatgcttgggctcccaccctccaccccccactgcaggcccctaaagggggttctttctctatctcaataacctgttttctgtaaaatgttagagttctttggtatatttatgggtaatatatgaaaaacttttagaatccaaaaggtttgaaagataatggattatagaaaattaggcaggtaggtttagtactggatgcctggtggcctttaatatgcttagatgccttgtgaatcaccagaaggaggtctctttggtgtttccccaaaatagcgtggtcacataacttcccatttagccccaaatatttcaaagaacatttttgaaaaaggttctctcatttcataggatgtttcagaatgttaaattttattgcatgtttaaaagcacaaatgataattatagagcactataaaaatatcagctatcatttggagatgcttttatcaatcttgacaccgagacaggcatctaagtgactgactcgattgttacttaaaatgtatttgttgtcgttgttactgttgctacttaattaattttgaatatacacgtgaagtcagactgtgattacagccgaaaagaaaactgccaccatgatgatgttccttataaccatctaatgatttgcaaagctacttcagcaagctagtgatagggtctcaatcagtattttaaccaaagtgataggaagattttgattgtagaaccttctgcaggaatcaatttatttttaggtcaacaaataagaatattttgcgtatatatccagattttctatttgccaactttttttgttataattttgattacactgtaaaccagagtgtatgtgagacatgtctcaatcaatttatgtatttatttaaaaacagggtctctccatgtcatccaggctggagtgcagtggtgcaatcatagcttactgcggcctcttcctcccaggctcaagccatcctgccacctcagccgcccaagtagctgggactgcaggcatgtatcaccatgctcagctaatttttgtagagacaaggtttccccacattgtccaggctggtcttgaactcctgagctcaatgaatttagaagtttattttggtgaggttaagagcctgcccatgacacagcctcagtagggcttgacgacttgtgcccaagataatcgagctacagcttggttttacacatgtattagtccatttttatgctgctaataaagacatacccgggactaggccatttacaaaagaaagaagtttaatggacttacaattccatatatctggggaggcttcacaatcatagcagaaggcaaggaggagcaagtcacgtcttacttacgtggatgacagcaggcaaagaaagagagagcttgtgcagaaaaactccttttataaaaccatcagatctcatgagatttattcactgtcatgagaacaccacaggaaagacttacccccgtgattcatttacctcccacagggtccctcccacaacacatgggaattcaagatgagatttgggtggagacacagccaaaccatatcattccagcccttgcccctcccaaatttcatgtcctcacatttcaaaaccaatcataccttcccaacagtcccccagaatcttaactcatttcagcattaactcaaacttccacagtccaaagtctcatccaatacaaggcaagttacttccacctatgaggctgtaaaatcaaaagaaagttagttacttcctagataaaatgagggtagagacactgggtaaatacagccattccaaatggaagaaattgaccaaaacaaagggactacagactccaagcaagtctgaaatccagcagggcagtcaaatcttaaaaagttccaaaatgatctcctttgactgcatgtccgacatccaggtcatgctgatgcaagaggtgggctttcatggccttcaccagctccatcctgtggctttgcagggtatagccctcctcctggctgtgttcatggtctggtgttgagtgtctgcagcttttccaggtgcatggtgcaagctgtcggaggatctaccattctggggtctggaggatggtggccctcttctcacagctccactaggcagtgccctagtagggactctagggcactgatgtcacatttcccttctgcactgccctagtagaggttctccatgagggtcccgtccctgcagcaaacttttgctgccctgggcatccaagcatttccatacatcctctgaaatctaggcaaagtttcccaaacctcgatttttgatttctgtgcacctgcaggctcaacattatgtggaagctgccaaggcctgaggcttccacgctctgaagcaacagcctgagctgttccttggcccattttagtcatggctggggttgctggggcacaggacacgacaccaagtccctagactgcacacagcagagggaccctggacctggcccatgaaaccattttttcctcctaaacctctgagcctgtgataggagaggctgccacataggtctctgacatgccctggaggcattttttcagttgtctttgggattagcatttggctcctcgttacttatgcaaatttctgcagtcagcttgaatttctcctcagaaaacgggattttcttttttatctcattgccaggttgaaaattttcttttctttattttattttattttattttattttattttattttattttattttgagacagagtcttgctctgttgcccaggctggagtgcagtggtgcaatctcagctcactgcaacctccgcctcccaggttcaagtgattctcctgcctcagcctcctgagtagctgtgattacaggcacctaccactacatccagctattttttgtatttttagtagagacagggtgtcaccatgttgaccaggctggtcttgaactcctgacctcaagtgatctgcccaccacagcctcccaaagtgctggtgttacaggcatgagccaccatgcccagctaggttgaaaattttctaagcttttatgctctgtttttcttttaaaactgagtgcctttaacaccacccaagtcacctcttgaatgctttgctgcttagaactttcttctgccagataccctaaatcatctctctcaagttcagagttccacagatctctagggcaggggcaaaatgctgccagtctctttgctaaaacaacaaaagtcacctttcctgtagttcccaacaagttcctcatctccatctgagaccatctcagcctgaatttcattgcccttatcattatcagcatttttgtcaaagctattcaacaagtcactagggagttccaaactttcctacattttcctttttctgagctctccaaactgttccagcctctgcctgctatccagtttcatagtcacttccacatttttaggtgtcttttcagcagcaccccactctactggtaccaatttactgtattagtccattacatgctgctaataaatacacacccaagactgggcaatttacaaaataatgaggtttaatgtacttacagtttcacatggctagagaggcctcacaatcatggcagaaggcaaggaggacaaagtcacatcttacatggatggcagcaggcaaagagagagtgcagggaaactcctctttataaaaccatcagatctcttgagacttattcactatcatgagaacatcacaggaaagacttgccccatgattctgttatctcccaccgggtccctccctcaacattcgagaattcaagatgagatttgggtgaagacacagccaaattatatcaacacattttagggagacataagacatcaatcattacatgcaagatatacattggtttggtccagaaaggcaggacaacttgaagcaggggagggttccaagtcatagattcagagattttccaattggaagttggttgaaagagtttatctgaagacttggaatcaatagaagggagtttctgggttaagataagggattatggagaccaagattcttattatgcagatgaagcctccaggtagcaggctacagagagaatagattgtaaatgttccttgtcagacttaaaaatatgccagactcttagttaattctctcctagatcagggaaaagacctggaaaaggaaggggattctctacagaaagtagattttccccacaagagacaactttgcaggaccatttcaaaatatgttaaagaaatatagtttagggtaaaatacttcaattcctttcagagcctgttatgtgatgctgtactagagtgaggctggaatttggtgtcttattgcacaaaaagtttgtttcatcagtcttaagatctctgttttaatgttaatacctacagttatgcctgaatttcaaaaggaggagggtagaatgaggcatgtccagccccaccttcccatcatggtctgaactagtttttcaggttaactttgcaatgcccttgactgagaggagggggcctattcatatgattggggggcttagaattttatttttagtttacaacaccttttacagaaggagaagctactctgattaatttgttaagtaatttaaatgatgaaattctacatatcatattgtcttctgaaggatgaactgagaagtgtattatctcagaattctgggtttgaactaactaacaaatccatttgctttcaggtccctcctccgtgaatcaaatttattcatttttttctgtagtaatggctgaaaagtagtgctgataattagagtgctattatgaataacacattgtgaaatctagaattctcagggtttctttgtttacttggttaattatttttgtttggttttgattttaacttctgaaaccttaccctgtgagggccatatggatcacctttcaggtataacatgattgtctcctatgaaacaaacaaaaaaaaaattgagaggacacagacaggaagtttttcaaatgtccttcagtttacttgttttcagttcctcaaaacagactggtgcaaagcagtttggagtttagaatagctttgaaagcatttattgttccaaggctaattttaaccttgtgataaagattgctttttgtattcagttgaatgtgagatccagtaattgtttgttaaggctaagtgctgtaggacataatacattttttaatggtgttttgtaattataatacaagcatctttatggcctaatatatgaaagaatgctattgagtagaatgatgagaaaacagacttcaaattttattattttaattattatatcgcatagctgcttatcttatatttagggtagtttgactttgtatgtatgctcaaataaatgatttttcattagctgaatagtttcatagattcttggcagaaacaaactttttatcctcctcatttttttctttccattttagtcagtaggatattggtgaggaaggttccctaaggtagccaaaacagaggtgtgtgttgcccgaaatgactttaatatgagtttgaaattacctctatagggaagttttatgctttccctctgttttccaaagtttttatgattggaatctctagaataaagttgaaagtagacagatttaacaggagaaagggcatacaaatttatcaacttcatatatacggaagtcccacaaaatatgagactctaaggagtgccaaattgtggaagcataaataatattttgagctacagaatgaagtaggggattggggcttctgaggggaggtggcagcacaagcaatagaagggtgaaagaaggaactgaactgaaaacaaaggttgccttatatgcagataaagtgtcccaggtagtagccttaagaataggtgaaaagtgtaagtgtgatcgcttctttctttttttttttttttcagatggagtttcacttttgttgcccaggctagagtgcaatggcgcgatcttagctcactgcaacctccaccccccgggttcaagtgattctcctgcctcagcctcccgagtagctgggattacaggggcctgccaccatgcctggctgattttgtactttagtagagacagggtttctccctgttggtcaggctggtcttgaactcccgacctcgggtgatccgcccaccttggtctcccaaagtgctgggattacaggcatgagccaccgtgcctggccgtgtctcttcttttgcaaggagttaatcttgactggttaatgtagattccagggaaggagttcaggacaatgacatttcttcaggaagaatttcctttagtcagataaaagaaacttctgagaaggcctctccctgcacttcaggaaagaaagaacaagagatgggggctgggagaaggccagagagaccttggttctgaggctattcctttagttcaaagtactcagcatatcaacgcaccatacttcagggtgtcgtttttttgagccccaatgcctctaaatcataaatttgtgccaagggtttcagatagcagtatctccaatctgaaatgttcccatgttgtatgttttgtagttgtatagataaatgactgaaatcctcatcagtggtagattagggatccaccaagggatctgtaatcccaaaggatcatgtaatacaagctcaagctcatcattttgttagtggaatgactagaatcaatattctttctaaaacatcattcagaaccatatgacaacagaggcagtaatactgaggcaaaacatacaatcttagagttatcaaacactgttatcttcagatttgcacctgctttttttctgcttaataagtttgttttcattttttactataaaaattgcatactacaaaaattatatagtttaagatatagtaaaaatgaatacctttttctcatttcacagaagaagagaacataagatattcctgtacctttgattctgtttgtgcctcctcaattatattcctttctcctccctcgaaaggtgactattttagattttatgataatcattttcttgcttttgcgtatgtttttcacataatgtatttctaaacagtgtactatttagttttgtttatttttttgcctcatataaacataatcacacctttatatttttacacagcttgcttttttcttgttattgttcaatattttgttttttcacatcaatcctagttgcagaattagcattagttcattaattttctctaccatatactatttgctcacaattccttttgttggaaatgtcttcattttttctttatccttgagttataagtctacaaggtatgcaattctcagttaacatttcttattcatataaaatattctaatctcttctggctttcattggtactgccaagaagtgagctctcaatctgctttttatttttgtgagtagtctttttttcctctggttattttttaattcttccctttcttgtatactacaatgtatctagatatcaattctttaaaaaacgtattttcctcagtttgttgttgtctggaatctaagaattggtgtccttcatcaattctattaaacccctgacaatatctttggaaatggtgcctctcctagttctctccatttgcttcttgtgaactgcaatttgatttttcctttaccttgttaagctattctccatgtctcttaacctctagatcatgttttgcatcacatttgtttgctttcaggtaacttgcccagatatatcatcatatcatccccaaaccattaggttttaattttccatattattttttttatttctagaaattctatttgctcatatgttatatcttcatgataaactttgagtttctcattatttatacattcaagtctctcgtatttttaagcatattaatttttttatattttacatctgataatcccattatatacattttttggtagatctgattttgtagctttttctttgcactggctcccacctatgatatcttttttctcatgtcattagtgattttcttctcttgtgggctcacattccttgaaaatgtatttatgggaatttataaatatttgaggtaaagtaaattctttcagagagggtctgagattgcttttactagttatctaaggacaccatgactaggaaccacttttaaaccaaatttttaacctcgcagtttaaattttggggctcacacaggttaagattcttagaagagacttacctccttgattgctaaagctgaaactgacgcatgacccgccattgctctctagttattttctagtgagagcatcactctttcttggtcctatatttatgtggcgatttctactctacctaacaacgtgctcagtcccagactttgtctgctgtctcagatgtttgtaactcagtttataggccaccagggatgggcgaaaaccttgagggtaaacaccacccaatagttagtttgcccttgtgaatctctgcttcgtgcttatttctgatctctcagaaatttccttattttgataccagtacagctatgcatcttttagaaaaaatcatatcctgtccagtaggtttatatgtgttatattgcaagggattcctttcaatatcttgttaaccatgttgtagaaatggaaaactcctctcttgactcttttagatactcctttaaatagtagtcatttcatttgcagtcgactgtagagtagagccagagatttacacaagttttcttaaaagtaaagattttaaaaaatatttatcacttccaatgaaaattctgctctaatacttgaagataattaataattgttaaaactgactcatgcttacaccttcacagctgctattctgggccttaaaagatttcttcaaagcatatcacatgatcatcttataagcaggccagcagaaatttctaagttaattaccgtttggcagagtgtatccaaaacctcttatctgaacagtgaacccaataatttaatcagtctgtctgttgattaatcacgttctaatccatctgatatcagcactaaaaaagcccttcatctgtttcttgtaaaacttatctccgtgaatgcacagctgctgtgagctattggtattaataacttgaataggagacagaacacaatggattctcaaagcctgcagaaaaagtttgaactccttaaaacagtcattcaggactctgcaatctgacccaactctatttaatcctcccatcctcatttccggtttatttcccagctttagccgtgaactagttaaagccagtcacctgaactcccacaacttttgttttgactgtttctgaagcctagtgagttggtgaatgaataaacatttatttatcaaataccacatgccagtcatgtgctgtattgcttcatttactatcctacaacttctctgtgacagagtgatggttatccggatcggcagatgagaaggtcaaaaaacaaaacaaaccacttttagtgtctagtttacaaaatcataagctctttgaaaaagggcaagaggaaaaacaaaaggctacatgattatgtgagccagtatttttatcagtcagacataaataaaattcagaaaattaatctccatatttctgtggtataagacaccacatgctttatatatgtgacacactatccaagaggtgaggaacatttggtgttgggtgagcactggagaatatgtgagtaaaactccttccttggcatatagcagacattcagtctggtcagttttcatttattattcccgtcttttaagcctaatcaggtcgtacattttttcttattcattttagaacaatgtgctcttctttgttcttccttacctacttcttccactgtcttccctgcttacgtagagtatctatccattccatcagttcagcctaggccaagactgagattaagtacacaccgtgccatgttgtgttgacagtcttcaacacactaacacatgataatgagagagtcccagtgtagtctaaaacactggagaatgtcaaagcattcttagaattttgatcttgcaaggttttgggccacaggaataggaaatggaccatcatgtttgattcaagactatggagagtttttatttcactaaatgataattattttgcctgtcttaccccattttcctagataattatcctttatcatgcctgtatattttcttctaaagtttctaaggtgaatttaaatctactggtcctggtgtcacagattcctataatactagttgcccagctctcaattacgccatcattgtttacctgagcatctgtgtgaatcctaattaattttatcctgccagacatagttcattaaacaagggatgactaactaatgcagcttaagcccgttagggcctctgtcaccaggggttaaaatctggcctaagagattacaagtttggaggagtgtctttccctacaacttgtagacttgggacttgtcagagagctatattctatcatatgaactgagacagagaaagccctctgtggagagacagaaagaaaaatgaagagataagccaacagaagcagagaggagacacagaatgattcctagctgaggtatagttgcatatttgtgtgtgttatgtgaaatactccttttccttaaaataaatagacaacaccccattttttaaaaatttaacttattcaagttgatttgtttttcttgcaactgaaatgagttctaattattattacatatattaaatgttaagaggtcactaacaacattattattatccatatcacataagcacacctgagttctagtctcatctcgaatgcttactagatatgcaaccatggatataggtcatgataatttgaaaagactgatatatgtgacagatttgtgctatacatatctaaaatattattatttctacaatgtcagtgctacaacttctctgataatttatcttttatttctaggataatagtgctatttttgcttattgtgttttccatgtagataggtctgaagttcctgatgacaaaagggcaaattctgtcactaattcagatattgagtactgtcgttatataagctactacaagagaaaaatatgatttattgggaacaaatacttatcttgcccactttgcacctccaagaaaaccaagtagagagtattctgaccattataaagtttattttgtggaggaatcaaatattaatatacttagttcatgaagaaaataaaatgttagtgagttctttcatagtagcgcaattgttctagaaactgggccactcttgaattttatttcacttttagctattcacagggtatcagtatgttagatttataatgatggaatctgactctgtaacaagatatttgttgttagacttgtttgtagagtgattttcctcttttgtgaaataatgtatggttatgttgtacttatctcagtaggattttattaggaaagtgatatattttaggaaacagttggtcatgaagtacatttaatttttgaactcctagtttgtaaaaccaaataattaaaacatttttgacaaaatatttacagcagaatcttggaagttaagaaaacaaaacaaatgtttcttcgatttcagttacaggttttcaagtaaactgataaaaccttatcaacaactcatagcgatatacactatactactgcataactcattgaacagatttctcattctgccacatttctgcagttcaagagtaaagcttctttataattatatatcactagtactttcagaaagccctccttgctctaccatttccaatttctcctccagcatctacctactccaagaggtaacttctatcttgaattatttttagttgttaccttacttatatttatagttttatcctgtcagtatgtttcactaaataatatattgctttgtgttgtgtgtcatattctatatatttttctagaacttgcccttttcattcaacaagatgtttataaaattcatccactatggtatatgtagccatgattcactttgcaaattttatttcttgttttcatccaactttgtttgaccccattctttttctagcctcttactcagacatttctgcaaagttttctttttgtgttcattgtggccattgtgactgttttaattcagtagtaaccatagaaacatcataagtttttataataagagaggtcaagtaaatgaacctaaacaaatataatcagtccgcttaccatttaaatctcttttctgatagagaaaaaatcattatcatcacttcaaatgttaaaaggtcactaatacttgatgttataatggtagttataatattacataaagcaaagatattacctaacacttccttttctataaacatctgtttttaaaatatctgaatatcgttaatgcactgaagatgagagctatggcagtttgtcttttttattatagagaatgaactcttctctactctaactattcttgaatatgtttattttgttatattaactcctttaagcaatgctaataagacttagccattaaatattaaagcaaaatattctcttatgaaatcatgctcaaattctagtcttcccaggtcaaaagctttagtaagttattgtccaattatttaaactctaactctagttatataaccaaagataattggttatatatgtgttttcattcatctttcacttaatttaaaaattctaaaagtctcaattcagtggagaatgtttttggcaaaacaatagcaaacatgacaatttgggaaagaaaatctagaataaaatttttattaccgatttattactggatgaatacattggaattttgcactttagttgaatttggaaaatgttgaatttctatgatgctaacaaattcctttcagatagttaacccattctacaacagtaggcatctgtaatttgagaagttataaaggaccttttatctttggttgaattaaggaatgagaaaattgacctgtttaaataaacattctctattataaatcaacacaaaggaataagcattctctatcataaagcaaataaattttcctttgatttggtttgtacttcctgttcattatcttgattaaggagatcattcataactttcctatgctatatttacagtttaacaccacatcgtagaagagaaaaataaaccagctccaacattaacaagaaacttaactcataatacacaaagaaaaaattcttaaaggtagaattgtaggctttgaggtattactgatgagggaaatgcttaagaaagaagcattttcttgacagtcttccaattaaatattgtcagcttattgatccttttggctaatgtgagatgttggctttgtggttattagtaggttactgtaaatagcatatagcatatagcttagaattcctgaaccatgaagatttttttccttattagttataggtgaaatttccattctgtgtcttttatattctatgatattttaaaaattcctatgtatactgttaagatgtgttcttagcatacaggacaaacataaaagacaactgtagttggacaggctcattagctaggaaataccctaggtggtcatggatcaggttaagaatacacatccacatgaaccaaaaaagactggtagttgtattgtatctgaatgggggcattctatttaaatcctagagatcagcgatacccagcagttaagaactagcaaccaggaaggtcttagaagctgcagtgagatgaagttcaagcatgctttctgtcagggagtcatcacagtaggctgcgtgagaaggcctatagcagtgggtgctttgtatcacagcatttggttcagggatctatccaagggagggggtgtactgagttctagaaaaaggggtccctgaaggatcagaagaagcaagcaagaacccaattctagacaaatggactagcaggaaaagatctaagcatagtaataaatcctgaactttgaataaaggcccgtttttgctataaagacatacctgagcctgggaaatttatgaagaaaaataagtttaattggcttatggttctgcaggctctataggaagcatagcagcatctgctaatgtggaggcctcagaaagcttccaatcaaggcagaaggggaagggggagcagtcacatcatatgacaaatcaggagcaagagaaagaggggagagatgctacacacttttaaagggccacatcttacaagaactcactcattatcatgaggacagtaccaagaggatgatactaaaccatttatgagaaattctcccccatgatgcaatcaatcatttccaccaggccccacctccaacacagaggattacatttcaacatgagatttgggtggggtatacatccaaactatatcaaagcccaaaccactggtctgttcagcagcagaatgcagccagcaataaatgtctttggttctcatacctcaggacaagacttattctagtgcctatggttttagtctagactcattgaagatacagtactttattttagcaccactaaaggccaggctggaagctgggcatgtaatagtaaacaaaatatagtttctttctttacaagtcttatgctgtagtggaaggtacagtcaggaatatagacaaccacaataaatggtagtaagaatgccaattgaggaaggtatatattgttatggtggcatgagtcagagcatgttactaagactcaatggagttggagagaaaagaaaaacttctcaaaggaactgaagtctaagtgaagatatggagaatgggcgggagtagggatgctgctaacgtgaatcagttttgttgaataagcaggaagcacctgtttccagaccaatgaattaaaaaatggtcatcaaaaccagatgccccattatttgctcaccaacacagtaccagggcacttgacttggtgaactaaatacagacttcactcctccttggctaagaaatcctgtgtagagaacaacttgtggcctaggttggacttacttaggtgaagagcatttagagtagggagtaaagcagaggaaaggaggatctcaaggtttaaagggtatggctcttgaaaattggaacacagaagaaaaccagcctcatctgagtgaaatatttcaagaattgccttctcagaccatgaaaacaccggagtacccactggatgagcttcacagagccacctgtagggacgtagaacatacatttaagcgtttgccaagatggaaattgacccacaaggcttgagcttcgtggagtaactctatttgtcattttacccattaggattgtgaaacatggtttcacaatagcaaatcaaagcaaggctggtgatgttgcacacaattacaatagaaatggaatggcttaattagtaaaaaattaactggcatgattcctataagttaaaatgtacatatttaaggaggcttattgtaacatttataccatttattttataatatactaattcgcatgtaaaagtgaatgtaaattaccagaaattaacatgcaatgtgaagaaaagtccttttatcctctgcaactgtagcatttggcagattcaggaataaataatcttttgtggcaagggtatgccttatcaaacatatgcagatcagcactaattaatgctaattaaggtttcctgtctatctagttggaaaaacgtccaaatgttatgaaatccagttagtatgcctattacgctaattgttttatatggggtggttcttaattaaaatatgtaaattgaccttaattgctatatactaatgggggttcatgttatcttactaaaagtgacaagatggtgaggaggggtacttaaatgactaattctgataaatccttaactaaatgacctttcctcaaaattaattttaattggaagttggcaaaagaaacattttccttctttgtttctttttagttttaagtaatggaagaatgttattcttcttcgttaatacagctttagaagcagttgtggattgttaattacacttaacaagcaagttaattttactgtttactgtttataggtatcaggaagttattgatatactcatttcagtcttggagaaagtgactttcttctcatttaaagtgaatatatagttataatcctataagtaatttcacataaccagtttattagaatgtgtgttaatggttgatgagccagtaatactaatattattccttcactgatttacatcggagttacttttttcagaaaaaaaaaatataaactttttactaacattaattcttattggagttaaactatgattggagatacctagattaaatagacagaaatgataaacttttgcattttacctatcatatttttattatttaattgcaaacaaattaaaatgagtatgccctaaatgagtgttaatgaatataaatatttttatttttgcgctattctaaacctagaattacaagaagtaatttagctaaagctaacaaatactttattttacctttttatttgcaagtagtttatgttcaattctaatttaatgtatattaaaaattcctctgcaaaaatgtgagaagggacctcataaaatattgtcatatggaaatgagcagataataaagattatagcttttctttgtcaaaaggagactcaatatctttactctttcatcaggacattgtgacaaatgtttcccccagaatcatccggggaaccacctctggccccatgtatggccctggacaaagctcctttctgaatattgagctcatcagtgagaaaacggctgcatattggtgtcaaagtgtcactgaactaaaggctgactttccagacaacgtaagtgtgatttaacatctaaaacaagagaattggcataagttggtgaatgtttatttaaacatccaattcataggcttataaatattaatgtgtatattttattaaagaatctgccagttgctttgctgatgcatagaaagataaaaaagaaagaaaagctcaagaactcataaaaacccacacaatgtgaagctttgttataaatgggtgccatgtaagatggaagaagtatctacataagcagaaggaagagaaatgaaatactcattttattgagttggttttcactgtatgtggctggtatttatgaaggtgatgaccttaggaagaaattgtaaactataaatcattttaaatataaacctgaggcagaagcagcatatcttcctatgaagtctatattttttcagtgggaaataatttattaaataattttaacactcctatactaaattagtcaactatcttttataaaatcttttttttctcttaaagaaccatgcctaaatattgcagtaaaatcaggcttgaatataatagataatattttctcttcaatagtctgattagggtgatccttaatgtcattcatttattgtccctatccctcccacctccctctcccacttcctatttttttcctactccttcttcctctttctctctctcatccttcctctcttttcccctccctcctcctcaattctctgtctctttcaaatatacacaacttatttctctttctttcattctttctttcaatgaattgttagtgaatggaggttgaggtttgaggcaatgtgtgggtttatgtcatcgaaaatatttttttacctacatatgtctttcaaagacaaaagacaacacttaaatatactaatgataaatatttttaaatctattgaaattggtggatgtttgtctacaaactgataaattgcaaattcttacaaaggaatatagaaatcacatgattgccttgcccatcaagttttttttctgttttagacagctctaattatttcaaaattatctcttgataattttgaaataaaatacatgcacatagaaataaaataaacttgaaataaaatacatgcacatagaacttgacataaaatacatgcatttgaaataaaatacgtgaaataaaataaaatactaacttgaaataaaatacatgcacataggacaaatataatttatcttcctcaagatagtcgtttggatgtgaagggaactatcgtgacccgtctaaaatctatagtttctgcttattagaaatttttctcttcctgagcttgatgtgaaaattatccctgttttcatattatataattaactctatatgagaattatgctgagctatttgtttattaaaggacccacatcttttgggaagcctttctcagaatgataaggactaaaaaaaaaaaaaagatcaactataaaaagaaataatatgtttgtaaacctgatctacagtattaaatactctgccaggtactgaacatgcaacataataataatggttataatatattatgagcactgatataacactcactctgtgctaggcacagttacaaaagttttatttattttaagctcatttgatctttttgaacaactttataagataggtagtattattttctctatttaactgatgaggaaactgaggcacacagcgattaaataccatatcaatcgttacacacctaatatatggtgaagctagaatttgaacttgaaatttgcttttaccatccatgcttctgttctgatccagtgcatttgcctatgttgtccttaaatattcagtattacatttttttttaactagagatgggtccccccgcccaggccagagtacattggcgccatcatggctcgctgcagcctccagcttctaggttcaagtgatcctcctgcctaagcctcctaaggcctacaggtgcatgccaccatgcccggctaattgtttaattttttgtagagatgatgtctcgctatgttgcccaggctggtcttgaactcctgaactcaagcagtcctcctacctcagcctcccaaagtgctgggattacaggtgtaagccactgttctagtattacattttaatgcaacatgagaatggtatgaaatataaattcccaaatactgattcaatagtatctagataagctaatgtgtctgaaaaaaaaaattttcctggaaaataactcctaccaatggattgtcttaacttcatgtgacactttttctcttttttgggtaggagtaagttgttgtaataatgaccaccaagaaatgacagtaagtggacaagaaagctgagatgaaacccttgccttgtgattctacagttgagtagaaagaagagacatagttaatattcttttcagtttccctggagataattttcttctcttagaatgctttttcttgagaaaaaaatgcatacttttcttgtttctgattctttccctatttagattatacacatcattctttttctgtattcctagaactaatttctaacatttttactcctcatatcgaagataacgttttaaataccattaaaatggcattcccatttgaacccatagaaataatgtgtgtgcacctcgatattgccatgctgagagtagacagtcccccgctgttttggaattattctgatgggtttgcccaatgagctgaatgaaagaaggtgacccttcattttccaagtttaattatcactcttgctggagttttttcacatcattctcgagtgcatggctgccacctttaatgacagggactggacaattcaacccactgtggcagcttctaagcaaaagctaacttttctgataaaaagaattgtgctgggtgtggacataggtcagctaatatcagtagctaatgtctctgtttccagagagggtgagcaccagttgaccatgaaccagaggagatggctgatgaacttcttgaatgtaaaggcagagagacctctgaaatatattgtgagggctcatctctgaattgtcacagttataccaaagcctacattcacactagacttctgcttggctttcaaggtttccttttatttatctgtgaattaaatttggcacattgatcattgtagtgacaatttattactgactaagagctttttgttcctaagctgagattttgtaatgcttattattaaatgtgcagaataactagggcttgcagaagtcagtttaaagtgaatccttttattctcaatgcaaacgccttatgaatcatgtattttgggccggggaaaattttttttaacaaaaaatacatgctgcactttgaatgcactgaattaggaagcaaagactgaaattttttatcatttgtggcagttaaagtaggaagcagaaggtagggcttcagcagtgaatcaggtagtgaagatagaaaaggaaatgatggctttgttagagaaattaataaggaagaacaattgatatgtaaatatacatctattacaatacacctcatttctgtaaaaaacacttcctcggttaattactgagagatcagcattgtacacattgggttcaaagtgattccaaagaagttgatctacatcagcactcctgaaggtgctttactgacaaatagcctctaaatattgagttcttaacattttatgtgtaccagggactccttaggcactctggcgaagcttgggagcctctttccagaatatttttgaaggcataaaacaaaattcatagggttacaaaggattctcactatctcacttaaaatatacgatatagtaatgtattttttttattaaggcactaagtaacaatctagtgatgggtctaataactactcaaattttgatgtcgtggtgagtataagtacttcagatttctgcagcaactctactgtgattttctgtgatttcttttggtccaaagtgacagatatcaatagtgccactatggtttattgcatttgtcatcttaaaaacatcagacaattggctgggtgtggtggctcatgcctgtaatcccagcactttgggaggccaaagcaggcagatcacttgaggtcaggagtttgtgaccagcctgaccaacatggtgaaaccccgtctctactaaaaatacaaaaaattagtcaggcatggtggcaggtgcctgtaatcccagctactcaagaggctgaggcaggagaactgcttgaacccaggaggcagaggttgcagtgagccgagattatgccactgcactccagcctgggccacaggagtgaaactcaatctccaaaaaaaaaaaaaaaatcagacaatttatacatttagaaaggagtaatacttagaaaatattactacctgtgggctaggaagcaggtttctggccaaaaccagagacagaaacttcaagggaagaaaggtgagacaggaatttatggtgaaggggttggctaagtatacatactaggttataggagaagctatgaatattcatgaagggaccttaacatctaagttacatattaggttatgggagaagctatgaatattcatgaaggggccttaacatttaagttacatattaggttataggagaagctatgaatatgcatgaaggggtcttaatgcatgtgtgctgaacaaacatgcatgttatatacatgcaatgttcactttgcagtggagacttaacatttgaatgtattacagttgggctgtgtacatcaaaaggtgaagcagagacatgaaggcactcagtgcacagcctctgtaaactgggcagaaccagtcgatggtttgtagtcccttattaggagaaagttgctaaaatccatctcttgtccaatcaaatctgtagttatgactgtggaagaggggaagtcggtcagcatctggtgatcagtgagctataattgtttttatattgcttatcttgaggccagtgcttgtttaactgccagagaaaaagaaaaaaggatccttgtggcactgagaacagtttattcaagtgcagaggtgcttgtttttacctttgcctggcatgccgttaggtctcctttataatttggtatcttattgaacacaaagagtccattctgtctcacctggggaccaagggcccttatttttaatttatacattcatgattgaaaaatgccaaagtttggaagattggtaaaaataaaagtctaaatgttttctcacccaagtttatggatttctgtattctataaagagtttctggaccgccggttaagaacctatgtccagtagctctctattctgtttggatattggaatctccttataagaagctttaaaaaagatacttatggttaggccctattctgttcaatcatttcagaaatctcctgtggatacaatgaatatatatgtatgtttgtgtgtgtatatatgtatatatatgtatatgtgtatatacatatgtgtgtgtattttttgtaaagttcatcaattgattctactacatacacagccagtgttatttatggctcttgacctatattattaaatatttttaaaactcctatatcagaacagtttattaagagcatttcatatgtttcaggcactgtgctaagggctttatgtatctgtgaagcagagattttttttcccattttaacatatgatgaaactgacatttagagatattgcattgactgtcttgggtaacacagctagtgagtgaaagcactaggccaggaaggctttccattacaccttgaagaaatatttcatttggccctaagtagcctgagaaattaagaatatgtgttattccaactctcttaagtgggcaatcttaaatataaattttcaaaaaagaaaacaaatgatctgacaaggaaagaagatatgttatcagccaagcattgttttgctgttaatcccagctaaggatattttatgcccagctcttaatgctttgcaaggatgtagctgtctattgaaaatagtgtcagtgggactccatttggacttggatttgagctgttacctggcctcatctgaaattctgtattccaaaatggcggaatcagggaactgagtcaaatttaggtgtcctgcaagcgaggaggatgcttattgcttacttgatgggcgtacgttagtccagagcccttgtacagtcttcttgccatctccacgaagactacctctgcaaaagtaggcttctatttctttgaagtttttataattaagtttcacttattagaaatagggggatttttgtcactcagacaactcgtttaaaaaaataaaattttgtaacaggtgaaactatatctgttgtcaggccagcaatggctagtgcaagataattacttttgttacttatcaaagaacgtcgagagcatgaacatcaccttagttcttttgccttgtaccccaaagaggatattcacaaagagaaatgtaagtctctgtactgaagggacttctcctttgttccctctgaaattttttgagcttgtcaagtccttgtttctgttgatttctacacagtcccatgctgatttattttaaataaattaggaaactgctgaagcaactattgaagggaagactagtgtatccccaggaaaccgttcagtttttttgtgctagagcttacgtagtgattttctgatattcatgaattctagagtcaatatatacttacatcccatcctcctttctttgccaaaattcgggacaaattttaactcagattatctagtgacattattttgtggacatttaaaaatattcttctaatttacaaaaaaagagaatatatcataatagtagtggaaatttaaaatatgagtggttaagagtaaaaacatccatgcccacttatcctaacaaaattctgtttttctagagttgtagtctaggagctaaaggcagagggcttagagtcagaacagatttgaatctcaacatctcctctgacttgctttttatgacactctcagcctcaattcctcatctgtgtgaccctcagagatagtttaaacattttgaaagattacatataacattttgacacacggtaattattcactaccataaattagattgcatagaatatttatgcatttggtttttatccctacttttaaaataatatttttgtatgttgtgaaagggagatttggcaagtcaaaggtaacagcatgtgtatagcttttaaagtatattgcccaattgattttcaaaacttggtgaactagtggttttatacaaaatacttcatttcagaaatagttaccaatttaaaaattaaacactaactcactaaatatgtttttcagtgattccttcaatttgagttcattatatgtcctatatcatgtaagtttttggactccttgtttaatgttttatttattatactcccctgctttaatatcattcattcattttacttcacagcttctcattaaaacacttaaatagtgagttcttttcttggtatcagcatagaagcaaagaaaaaaataaaatatatttaatttcacaaaacaagggtagcaaaaaatgaatcagaatatgtaatatggctcacagttctgtgattagtttacggctccatgtagccaagtattttcttgacataggacattcgtagttctttaaaataaaatgttagtgcatcctagatggaaatggagactggatttaacctcccaatggaaacaacaacaaaaatcttagaatatacatgaaacaacagcttttaagacctggaacatcaggcaataaaggagagtggtcactgagagatagaaaacaaaggacttgccccaggccctgagttgaggaggctagaattcacaagataaagtacagaaagcagagagctacataaagagaattccagagacctgcaggtgttctcttgagtatgcagcactgagtacagatcagctcatgcatgtgagtaaacaaagagactggaaaaaaggaggaatgacatggactactccttggttcttacatatatctgggaatagtgactgttcttgccagccaaactggaaaactctatgaccacaagcattgaatagaatataaataagactcttaattaagtattgggaaataattagccccaggctgagcactgctttggtcatgcccagcaaatgttaaaggtgagatctgaaaggatcaacgtgtttccatataacttaactgcaacccagatcaaagctgaagaatatttataggaatacaaaaatacctagcaccaaaaaaggtaggattcacaatatccagcattcaataaaaaattacctgttatgtaaataagtagaaaaacataagccattataggaggaaaatttatagattaaaaccatcctagaagtgacaagattagcattagcagacaagtacaataaagctgttataattatattccttatgttcaaaaagctaagacatggaagatagataaaagagctaaataaaacttccagaaattaaaactacaatgaataagatgaaaggtaactggaagctatgaacagcactttaggcattgcataagaaatgattagtaaccttaaaaatataacaataaaagctatccaaaatgaaacgcacacacacacgcaaacagagaaagagagagaagtaaacataccatcagggagctggtgacaataagtggcctaatatatgtgtaattagagtccctgaaggaagttgtggaaatacagaaaaaaatttcaagaaataatagtgcaaagcttccagttttgcctaaaactacaaacctcccaaaacacccctccccaaaaaaacccccaagaaacttcatcaactccaagcataagaaacattaagaaaactataccaggcagtaatgtaatcagattaatcaaaccagtgataaagagaaaaatcttaaaagcagccagagaataaagacatgttctgtacagaaaaacacatgtaacagttactagtgtgattaattgtcagaaacaatctaagctatgagacagaggggcaacatcttaaaagtactgaaagaaaaggacgaatattaacctagatttcaaaatccagccacataccttttaaaaatataagtgaaataaataatttttcaagcacaataaaaggaggtctacactgcgtaatgttaaactgttttaggcagatggaatatgatgccaggtcaaactgtggttctacacaatggaataaagaccaccagaattgtaactacatgggtaaatatatgatgttttcccattaattaactcattttagaagaaaataggttgtttaaacaaaaaataagataatatgggggttatagcatacataaagctaaatgtacaactatagtacgaaagttgggaggaaagagatggaagtatactgctctagggttctaacaccttttgtaaatttttctattacttggaggtaggcttttataattcaaagatgctctaagagtaccttaaagatactctaaaacaatcactaaaataaagcctcaaagagttatagccaaaaaaccaacaatcaatatataatggaataataaaaagtacttaatccaaaagaaagaagaagaaagaggagtaaaaaagagatgagacaaatagaatccatatagtatatagatgataagagttaaacctaaccattaaataatctcatgaaaaatgtaaatggtctaagcaccgcaattaaagggcagagattttcacattggatttttttttttttttttgagagggagttttgcttttgttgcccagactggagtgcaatggtgtgatattggctcaccacaacttttgcctcccggttcaaggcctcagcctcccgagtagttgggattacaggcatgcgtcaccatgcctggctaattttgtagttttagtatagacagggtttctccatgttggtcaggctggtctcgaactcccgacctcaggtgatccccccgcctcggcctcccaaagtgctgggattacaggcgtgagccaccgcgcccggccgaaaatagacttctaaataacccttggatcaaagaaaaaatcataaagaaattagaaagtaccttgaactgaatggaaatgaaaatacagaatgtcaatatttgtggtgtgccataaaacattattcatggggaaatttatagtaccaaatgcatgtatcaaaatgaaaaaaagtctcaagttaatgacctacatttttacctttaaaaactaaaaaaagagcagattgaacccaaagtaaataaaataaatgatataataaagatcagagtggaaaagaaatgaaattggaaaaagaaaaaaaatagagaacatcaatgaaggtaaagctggttccttgcggagacgaaaaaaattgaccaaactttagccagactgatcaggaaacaaaaagaagaaacacagattaccaatatagaaaaggagagagataacatcactgcagattctacagatattaaaaggaaaatgacatcatattatgaacaacattatgtaaatgaattaatcaacttaagtgaactggacaatttccttgaaggacacaaactataaaagcttattcaagagacaatagataacattagagaaaataaaacttcaggcccagattgcttcacaagtagattcgctaaactacttagaaaagaatagtgccagttctatacatacctttcagaaatgtaaaatagagggaatacttctcaacacattctatggggccaacaccctgataccacaattagagaaagagtacaaggaactccagataggaactccagatagggttaatatttgaaagtagcatagttcatatgttataaactaaatagtgataatcacacaaaatatattatctcaataaacccaatagaaaaaaaaatttgaagaaattaaaaatctatttctagttaaaatgggaaaaatctcagcaaattaatagtaggaaaattccttaacttgatgaagggtatgtacaacaaagcctacaactaatatcatactaaatagtgaaagactgtatgctttcctcctaagtgaaataaggatatctgctttcaccaacttccattccacattatgctagagattctgccctgtccaattagaagaaaaaaataaaagactgcaaaggaagaagtaaaactgtctttatatacaatttgattatctgtgtagaaaatccatggaatataccaaagaaacaaccaaccaaaaaaatcacttaatttacaggaacagtcagatagcccacaggctgttgtttttagattgtattttttttttaattacagtaaaacaccttctcttcattactgagacttttgccattcccttaatttttgcagctgagataaatacctaacttgcctatcctagatttggccctgtcagaatactttaggtaatcagtgagtttgacaaggttgaaggatataagattggcttgtaaaaattaattgtatttttatatgcaagcaataaacaactggaaattaaaataaatatatcatttacagtagcagcaaatcatgaaatacagataaatctgacaaaagatgtgaaagataagaacactgaaaacaacaatccatttctgagagaaattaaagacaacctaataaatggaagaatatactgtattcatagatcagaggagccactattgttaagatgccaagtcttcccatttttatctatggataaagtgcaatcccaatcaaaatattagcaaaccttttttgtggagtttgacaagctgatcttgaaattcatatggaagtgcaaaggacttacaaaacaattgataaagaacaaagttggaagtctaaaactttctgataccgagctatgttaaaattacagtaatgagatagtctggtgttggcataaagataggcaaatagattaatgtggcagaatagtaagtcctacaaacaacccacaaattatttatatgaacaactgatttttgacaaagatgcaaaaaggcaattcagtggacaaaatatagtctttcagcaaatatgctggaaaaattgggtgttcttatgcaacaagaaagtaagccttgattcagatctcacatgatatatagaagttaacttaaaatactcatagacctaaatgagaaacctaaaactataaaactttttgaagaaaacttttgacctttgttaggtaaatatttgtcagatacctaccaaaattactgcctttgaaagagagaaaaaggatatatgtgatttgatacaaattaaaaacatttcctcttcaaactcgtttataaagaaatatgaaaatacagatgacagactgaaagaaaatagttgcaaatcatatatctgatacagtactttggtgggtttattttagaaatttaaacatatacccatcatatgacccagatattttacttttagatatctacccaagagaaaacaaaacatatatctatacaaagacttgtacgggaatgttcatagaagttttatttgtaacaacaacaacaacaaaaaacctgggactaactcatattttcatcaacaactgaaaagataaacaaattgtggtatattcatactatgaaatatcacttagcaataaaaagaatgaactattatacacacaacaaaatggattaatctcaaaataattatttcaagtgaaggaatccagattcaaaaaaaaaaacacctcacaaaagtacatatattattatgtcatcctaaaactagaaaatgtgaactgatctgtagtgacacaaagtaaatcaatggttgtcttatggacagaggggttatgagtgggagagaggagttataaagagtcacatggaaactttttggcaaaatagatatgttcattatcttgattgtgataatggtcttaaagtattacatatgtcaaaatttataaaattgtatactttaagtatgtataatttattgtatactttaataaattattattttattctttatataacatatatagaagtatacttccataaatctgtttaaaaaattggtttaacttaaaattattatagcccttttcctggaatgcatcttgggaattacttttaggttgagttgaatcgctaacacccggctacctagctcttcagtccctacccaactcttcaagttaccagtcaattaacaccctctagcattttgatcattctcactttgatactgagtcatgggaattaacatgaagttaaaaatgaccttagatagtattaagaaatgaaagaaatattggttggattgttaagctttggctttgctgaagattaaaatgctggtggttcatgtcattcagtaaaagaagaatcttgagaaaatccatcaaaccttttaaaagagtcattttacaagcattactggctacaacatactctttctcaaataccccttcattttgtaatttgtcaggctgcctttggggtgagaatattgtctttccacattggaagtatagcatctaacacactgaaccatgtgaaagagaccctggggatggcaatgatgcagtgaatgtggagtctttcatggtataaactagctcatgagagaggcaatggaaacaatttataaattgcttatgtttgtcacatacccagttcatgtcaaaaaatgaaaataaaattcatattcaaagagctgaaaagctttgttcagtaggctcgcttacataatatcaatttagtaatatttcataacaattcgtgttgcgatctcaactccaatgtaatcttacttagtatcaatttggtactatttcataacaatcagtgttgagaactcaactctaatgcaatcttctcttaaagggctggggaaagaaggagaaagaaaggataatgtgaaaactgtaacaattgttttcctcctacttatcccctcaagcctttaaaatgtgcaaagggcccatttaatctgctaatttgtaagcaattttagaaaaatgcacaactgttttatgagaggcttaaatgtaggaggcaatataaagtttttatttagcagaatatgctacaagtatatgtgtttcattagctctgttacaaactattcatttcattttactcttttttgggcttattgataactatatattttttttctcccccagcttccttttttgccagtagctagtttattcttttacattgtaccctacagggaatactctttagatatttatttttcacaaagaactaatttcacattttccccctgaggtcttctaagatatttacttgaaagcatcctctttattgtttaaaatagcttataaaaaacaatacttaacacattattttttaagggtttatatactgtattttaatgactgcttttcttttttaattgttatttttgattagataattgattcagtttaaactatatctgtgatccacaaatatgatccaattaattgtaaatcaattaaaaagagactgttcatgagagacacaggactactagcttaatcaccaggcaaaccagacatccttaaaataagacaaatgaagtatactttgatataacagttaaatgtgtataatgaattctttaatttactgaaaattttactatgtgggatatgtcttcattttaataaccaaaatttataaaagtacaaattagaatgagggccattttggtaagaatatatactaatacaggtaactagtagttatccattttaataggaggcagggaagaatcagtcaatgaaatttgttggtaaagatgtaaccatatttctaccagtttcttcaacctttctaccagtgtatttcataaccatgttagagagaaaaggtacaattttttaaaaaggagcaaggaagaagaaaaaaagagatatactttggcaatgagccttttccccaaaacaaactgattcttaaggaaagtagaagaaacaagaattgacaaaggggttttacaaattgaaaacataacagtttcttagttttgtatagccatttataggatacagatgtgtatttctctgaatcgatttcacaataacctcacaaaaaagatatgaatatcatcctgattgcatgataagactgatatctggatgaaggtaaggactttcctatggatagtttttaaatagtaagtgatagaatttcaaattgaacacagaacatctgaccacacagtccccactgttctgctaagaaactgtattttcttaaataaaactatgcatatatacttacgcacaataaaaagattgttttttaaagccaaacatcagattatttagaattatctatgaatgatttacttttccttttcacctggattttcatttcctttggtggaggtgctaatgagcagagaaatgggaaaggtaatcagccagagggaagagaagaatcaaagacctagataattcacaaactggaaaatgagctcctaactaatcaagactggattgtaaataggatagaaagaatttatgcatccctggtattagcctgaatagcatttgtacccaatccaaggaaagtatttgtgaatttcacagttggctattttttctccctctgagattcttttcctgaactaattatccattgtgtacatgaagcaaagaaataacttatcattaaagtcatttttgaggtagatatttcactttgcatttgttaaaatgcctagagcattaataaggaatgagttaactttattaatacatcttctttggggagtttctgatctatatactgatcagccaaaaggaaattttctgtaatattttagtcatgcaaaatttagggaagtaaccagattgactaatctttccataataaataatttaatttaactttgtgctgctttttgcattttaattttttcataatgtgtcctttaaaaccttcaatattaaaatgatcagtgactgttttgtgcctgatttagtttaaattgtaaatttagttatggctcttgggttacaaagtatgggtggggagatgtcttaatataggaaatgaacacaattaaaggctggaatggctacgtgtacaataagtttttaaatgaattactggaaactgtgtagcaatcaatatgagaaatgacatataacaccatataacagtaattattattgttacctcgactataattattcctcaaatgctttacatttcatatattttcatacatactattcaactgcagagttgtatgaaatgttttatgactcacagttgttgcctaatctctgcttaaaaccttccaaggcctttccaattcaaactcagactgctaggataatagataccatatggttagcttatgactttgaaattcaggcaggacttctgcttctagtaaggatgtagaaagctataagagattattactcctaccctaataaccataacaaaagatataagccacaaaattagacttttaaaaaacttacctaaaatctgaaaatgcaaataaacttaaatgaactaaatttcagaaagtgacaaggagagcagaaactcatgactgctttgctccctggagaaatggtgaaaggaagatgtcactgtagagacaccagttaaaattgtaaagaacttttaatgaatgtttttagagttgtgtgatgtgtgagaaccccaagaagcccaggcacggaccatctctgcactcatcaaccaaccgtctcatgggacttcactgaattgtcaaccaaatgtaaagccaaggcagccaagctgagagatatcccccctaaggcaagcagggcctcctccagttaaaagaggtctgctgaaggctaaggcagggaaaaagccttgagagaaatccccccagtgcattctaggccttcactagttgtactgcagtggctctttggaagactagaggaagggaagatcagtagaaagatatcctgaagcacaaaaaaccatggtgaaactagagagcagagagaactcccgagcaacctaaaaacctaggagctggcctgtaaagcagcaagagatatcccttggttcagaaagttggttactggattaacaataagtaaagagattctagagtctttctgggactcaagtcccaagtcctgctgaagagaaggttctgctctcgacacatttgaaggcaatgaagaaccgaatctaactaaagcagcggcacaacccagactctgcttaactgtagacttaatccactcagtctcctaattagcagcctaataagagaagtggtgtgcccttttctggggatgactattatttctgtaaatttctactgctcttttacagaaaccatctggcactcaataaaaaattataagacatgagggaaaaaaagtgtggcccaagatcaacagaatattcttgagagtggtccatagaagcagacccacacatagaattggaattatcagatagagacgtaaaataaccatgataaatgtggaaaaaaaaaatctagtgggagaggtggaaaaacagtcatgaaaagatgtggaattttattagagagttgtaaaataaatattttaacagatccaaagagaaataaaagaagtgaagaatacattatgagaaatgaagaattcattgaccaggcttaagggagactagacaagatggaggaaggaatcagtgaagttgaagacatagtaaattagcataggcactatggaaagcagtatgggtgtgggagagggctctaaaaaagctaaaaatagaactaccgtatgacccagcagtcctgctgctgggaatatatccaaaagaaatcactatatcaaagagatatctgcaccctcatgttttttgcagcactattcacaatagccaatatatggattcaacctaagtgtccatcaatggatgaatggactaaaaaaagtggtatagatacacaatggaatatttttcagccgtagaaagaatgaaattctatcatttgcaacaacatagatggaaccggagaacattgtgtcaagtgaaataagctaggcacagaaagacaaacatttcatgttctcacttacatatgagagataaaaaactgatctcatggagatagagtgtagaatggcgattaccagaggctgggaagtgtagtgggaggggaaggggaagggtaaagagagattggttaatggttacaaaaatatagttagatagaaggaataagaactagtgttcagtaatataatagggctaatatagttaacaataattaattgcatatttcaaaataactgaggagtggaattggaatgtttctaatacaaagaaatgataaatgtttgaggtgatggatatcctaattaccctgatttgatcattacacattgtatgcttgtatcaaaatatcataggtactccataaaaatgtacaattattatataaccataaaaattattgaaagaaattccccaaactgacaaatcaaagagaaaaaatatgccacagtgtccaatacctgtggaacaatatcagaagttctaacattcatataattgaatgttataaagagataagatagagattggagcagaaatcatcaactcgcttggtaccatctcccagtggccttccttggccatcattttaaaagcaggcccctatgccagactccagtcattctcaatcacattgctaggttttagtgcctcaataatattcatttctgtataaattgttcattttttttctttttattctaccaatatttattgaatgtatgctaaatgccagacattattttagaacctagtattgaacaagacagatggagtctgttttctcacaaaacattttttctctatgtgtaagaatcttttttctttgttttctcatttacccctgaatctgtacctccttgaagaatggctggtgcataaggggagcgcaataaatatttcttaagaaaaaataaattaattaattgtcctgcaggtcaattctaaaaccctattttttaatttcctcctccaggattgtctggaaaaaactgctaagcctgttctgctatctgttattttttttttccttctgaactcaggctccacttctactaaattctcagtaggattggttcacatataggcaatgtttacaaattgatatagatagatataaaaagtatatagatgtaaaattgtatttcagtaagaggaatcagatgttggggaaggataatcatacttctattaatgcatgaatccatgcatcttgtaattatgtgcatataagactctgcttactaaccagacagcagtctcgcagtgttcctagggccaagccccatgcttagcacagttcaactgcttctcttttatgtgcatcatagtattttattaaaattcacgtgaaagaggacatttttttttttcccaagactgagtttcactctgctgcccaggctggagtgcagtgacgcgatttcagctcactgccacctccacctcctgggttcaagcatgctaaataatctataaaaatcagtcttataaataaaggacatatgccataaaatgtttctgtttttttaaaggcaactgtcaaaatactttttagaaattattcttctcatttagaatccatgtcccgtaggccttgttaggcggaatctgagaaaccaatgagcaaatctgtcagtctttcagtgactggattactaagtatatttcaagtcacacactagaattctccaagggtacgacttcattctcatagttgtaactaaggaactactacacatctcctgcgattttctgatttatgttcagatttactcccagccatcactggaacaggacagtcttaatgatagtaggaaaaatgtgagttgccattatttagcattctcaataaacgtaactgaattattaatcatagagacactgaatgccagagaaactttgaataattaattatcaagcattatatgacttagtctgtttgtttaccaagggaaaaactaagggttaaagagattggttccaaacttgtgcaaactagtgttcagtttgtccacatttattaagcatatcatacttcttttcttaaatatgattttgattattgattacccccccttctccacaaccctcttctccacatccctattcctcttaaatccagagaaaacacaagagtatagcattaaatttcagatgcacatcttttagaattatgtgttgccaatattgattagtcagggtatcataattaatgatgactaaattcgttagtagaagctacttgtttttgtgccagttactagactgagtagtagacatactttatcactaattctcagcacaattttagacaggaggtatcattatccttactttacaaatgtggaaactaatcataaaaaataagaagtatcttactcaagataaaaagactagaaagtggcaaacccaggaattgaacctcagagttttcaatctctcctatatacacaacggttaaatgtaccatatacctaatcatatttcctgacctccaaaaaaagaataaagagaaaataagatacttctttctgtttatgattaaggcagatgaatgtatgctgaagttatttcttaagtaaaaatttatttacagatacactattgatttaaatttaagaagcataccacttttttaggtaaaatagaaaatcaaattttgcaaaataaaacaacttagaaagcataccaatatttctactcctacatatggtacaattatattatcctatttagtaaaacaaatgataattcttcattaactcagatttaccaagatgtatatcaggttaccctggttaatagtttgagatgaatgtttaacattatctctgtatgattattaagactacataataatttgtgttgtaatttataatactccccaaatacaaattcatgtctaatgttcatttctaaaaatgcccacactattttactacttaagctcttaaattttcctgaactgatattttgattttatttgaatccttataaaactttttaaatgatttaaaaaatttaataccctatttacctaataatctattaacaaaaagcccactttctcaggctaaattaacactacagtttaatcataatcatattcacattttgaaatctttcttactgtcactcacatgagcaaacataaaaacacctacacatgctcaaaaaaaaaagaaaacttaaggacttgctgaattttggacaacatgttcattttcaatttatctgaatcacttgtgtctgtaagagatgttatgaagtttaatttttaaaaatctgaagtagattttgttgttgttattttgcttttagtggttgttgtttcttggctggctgattgaatttcttagtcttagctgcctactagcataggatctcccggttacttctaaataatgagctcaaactctgaaacttccaggaacaaaacctactgctttcctgcctctattgcttccatcttactaatttgtcctatagtatctgattcattgtattcatttacataagtactcactgggcactaaatttttaaaaaattctttttcatgttcagaatttgaagaactgcctttctttccaaaaatagatttaaaaaactgacttatgtattaggaaatctgtaatttgtgggattgttgatgttatgggggaaaatcatggagcacattaaaataaatggttaaatactgtaccatgatcttgaagaactagagcctttcatggctgtgtcaccaactatatgaacttgggcaagtcatagctcatctataaacaaagaggttgggcaaggtcactctcctagagatactacacttctgacaatgatttgattaaatggacctctcactgaggctcagaaatcactttcgtaatgtataacttttattgtattgttacagtgtgtattgaatagtagaagaaaaagcttttatattttaactgaaccataaatacttagccattttttaggcatctttgaattgcacataagagaaaccagtgggatctcatgcttggaaaatatatgagatcattccagaggtgaatacatactattttctattccctactccattttagtcatatgtaatgaaatggtttgatgggagcaacatagaaaattactgagaatttttatattctgaggttctttgactgttggctgagtgggcaaaggggcaggattaatatctatttctggaaaaaatgtttgagacggaggtgcattttcagggagagatttttttttttttcttgcttcattgggcaagaaagctttatcttgttctgtgaggttaactatgggaacagaccactgctgggagctggggaacacaagaccgaaagaggaagggagagaatgctctgttagtttcctggctagacaggtcacattgcacttggggcatgaagattagggtaagagttttaaatcacctgtgaaattattttggtacctagtatagagtgaaggattggggttatgttttcttagtaatttcctacaacagacacacaggagttttatattatcgcctgtatgtgctgaaggtatagatctttaggtaaacacaaatgtcagtcatttggccaggcagaaataagagtaggtttatgttggctcttgagataacaatcagaaaaaaaaaagtgaaggtcatttttgtctgatctttaagacttccaatatcagaaaacttaccttttgatggatagtaccaacaaatatttaacttcataaacagataattaatctcaaaaacaaacaataaaagataaatctttggatatatagccctccttttgggtcatagtatcccgaggtagtagttgtagatatgaattttcttaaaggacttatttgaagattaactaagaaatactataggttcataacaacttaattcacatattatatactgcataaaaataaagtccttcttctaccaactctgaatcttaaatctcttatgccatagaaatttgcagagacatcagataaaatgaaattctagtttggcctaaaaagttaaagacattataaaaatcatgcatcattgcttaaggttaatattctctaatcagttaccacccaacaagaattaactctcctcttttctagagcacctcccttttgactctgctctttgaaacatatcctcttaacatctcttgataacctaaatttttttctagatcctagtatctacctctttgcctttactaaaatatctattaaccctgaaaaagaggagtattccttaaaaatctctcaaatagaagtcactagtttccattgtctctgcctacccttcatcccaccccactatagagccactcctctatttttaagccaatagttgcatccagtactcttcctgcttcgcagtgccatttggagagaggttgagtcagcattctatgtcaccaaaccatattctattagactaagccacactctttctatccttcagcctcatgggtccttgctctgcatttctttctcttcttcctccttacccccaaatattcatgagacctttggtatattacttttaatctttgtctgctgtcagcatttatggtctttgctaccacgtatcatcctctagttacttttgccatcatgtcactgactttcttccatagacagctcctgcccttcttttcccaaagaattttgccacctctgcagttttgaaagctgtgttcctgtcatctgaaccgaagtccttatctctatatctcccaccacgtgtacttttaacaatttcatgacctcttgcctcgtacctcctttctgctctaattctaagccaatttctgattctgctaccctccttttccagcctatatttaatgaacactaatgtcaactaatgcctttcttttaattttgaaaaaatgaaaaataatgaaattattttcatagaataataatgtaataacacctttgcatagaaccactcagaactgacaaatgttgttttttttttttaatgtttgctttactttcttctttgattatagttttaaagagttaagatgcagactttttttttggtaaactgaagctgaaatgtataatatgtatgaaattgtacagctaaaatgcaaacaagtgaaatttctgaaaaaggcattaatgaaaagaatgctgtcagggttcaaatgtgaacttgtttacaatcctatgcaggggaattgaccagagttgggggatttaggtgaagccatagcatgattggacaaagtctgtttgcaaaatgtcagatgtacttttctggctattgaagttcaactatagatgtaggatcccaaccatatatgaatcattatagatgccttcgtagacatctgtttctataaaagaccttttctaaatttccctctggagtaatgaagtgctgggtcagtaaaggagactaacattttgaaaagttatagtcataacaggaaagccgaaatctctaagtttcccttctttcttcatttttacagttttagtaacaatattcttggttaatatttaataggataataattgtttggtctactttgatggtttttgcctttataatgttatgctgaaatatctcgatttgcttaattgttttctaccgaaagattctaaataggcaaatcattggagatcactttcataatctgttatattatattgttgtaagagggagacctatggcagatattttttatttgtttttctttagttgaaatgtggtaacatctatttatactgctgattttcttataggcttaaaaaatagtattgatgcagaagcacacatatttatcatctggagatttcaaattaattaatcctttctaaaaaaagtttatcagtattttataatgcgataccctaagcatagtcatcatataccctaggttttctagggcagagtctgtgaaatttatatgaaattgatgtgatattattgttataacttcatatatttttaacacaaaaaaattttcagatctgaaaaactgaattgattaagtctgtgcttaactaattcagaacatactaaaataaaggtaatgtgagaagctgacaatggtcagtttaagaacttttaattgcttgggtttatatgttgtggaaaactctgagaaaaaattaaccttcaataagacagcattcagaaaaggatttttttcagttcactgtgggcagaagaatccaaaatataatatttaaagggttcatactagctcagatgctagtatcggtttctggagaaacatcgatcttacgaaggtgacaaaaggtatcctataagaattagtgagcccaaactatataatgagtgttatagagaaattcactatgaatatttgcataagaaatgataaagacacatagcaactataatcagtgttcattttctccttactgtgattctggtgacattctttaacctatgggagtaaaggatgcttctttcatattctagcaggtcttgttttcacactgtgcttctgtgtcttgcctgaacagtgtgtctatgtttcctttcccagtagtattctgaccaccactctcagttgtcttttctattcaggaggtgaaagagaaatttctaccctgtttccatcctgcagcattatggttatttctgcataaactatcctatcaaaagttctagagcctcaccatgtaaccacgaaacacccattactataggtgtaatgggttttcacatatcctttccacatatcctttgatctgaagaatattaagagctttcaagataatcatttttattaaacttatgaacagcttttaatgtagtttgtttaattgtctggctttagatgttattggaattgtctcttgttatcattagtagataaaaataaataccattatatactaagaaagttctacataaaaagacaaacagatgtgtcatagtgtcggtgtgttaaagaggtgcaaatctgagaatcaggaggactaggtctatttttggctgcatatttggttttatagtgggtttattggaaagattttgcactcacaggctagtggaaagatgaatgacaatattaatttcttattttgtaatcagtgtcagagaagcttttcagtgcaaaatgtccaaagagagaagaggactagaaagtaaagggtacattaagctggaacctgaagtgacagtgctgtgttacattgcagagattctgcagtatgtcagggggttggtgattcaattgtctgaatgcatgatttggtgggccagtttagacgagagcaaactggtcctgtcactgaaatcacaatgggtaaaaatggacctattcaatctgcctctcaatgccccaaattcttcctggttgtaaattagagctttaggacaatgcattaactcattcgggtcaccagggtactatgtcagctcagtgctcacaattgcccatgaccaattctgcactctccccagcaggagggaagcaatgtcattttgtactctcttctttaggataatatcaggtctgaaagggaaggaacaaaggaagttgctgctttccttccacctaccccacttagccataatcacacccctctttccacttggccagactatgaaccagacagaaaatgagcttagaggttgtgtggttactcaaagacttgaataaaatcaagaattcagtgctgttcagctccatcttcaagtcaaagaaaatgggcatatgggcagcataggagagctggagcattttctacctcatccctagtaaaatcattacaatatgatttctcttgctaggaccaacatttttatgtggctactgtctgcttccatgacagcatttcactccattccctgctcagtcattaacatccagcaatactggctttttctgtgtgtttaaacatgcctagttctcggtgcatgtggaccttgatgtatgatattccccttacttgaattgagtcattgttcacccaaaacagattccagctcatctgtgaaatttccattttcatgtcacttctacatggagacattgcctgaaagggtgaactgtattacaggccacttatttatttactcattcatttattttggatagcatcttgtttgtagcacttaccacattttgtaatgtataccattgtgttaatgttccttgaatgtttctcttctccactggatcacaagcttgaagtatgcaagtgtcatatatgttttcttgaatactgtattctcagaatctagtccaattcctggtccatagtaggtgctcagggaatgaactcccagaatccaccaccctgtcatgtgctcagggtccttgttgtgacctgtacaatgtgaagtaatactagtgacccagtagcccgtggaggtaggaaatgagacatctgaaatccagaccagaaaaatacattctaaaaaaggttactctactttacctctcctttgtttggtacattcttggtcttctcctaggtcagtctactacaatctctagttagcagcaaacatgttatcagagtaagtctgtaaatgtgaccttagctttctaattcaaagtcatttgtcctctgaaggcttctccagtcatttccatggtcccttgttaaagactaaacaattaaattgtgcaagctgtcttccctttaattgtaaaactctcgctaataagtgcattattttatttgaaatgcacattttctaaaacgtaaataattccatattcaaatattgctacctatattaatattttaatataataatgttaaaaatacttcccaaaaccaatgctgataactaaaagattgttaggtctttgcttttttaaaaaagttaattcctaatatcactttcaactattggtgagaacaattccatatctcttgctttcctgaggtaaaacacaaggtgtaggaataaacaacaatttcaggggtattgtaatacagaactccaatccccactgcccctattctgtatttctgtgctcccatcctcaggggctagcgctttatatgcctgactatttcactcgtaccatttcagaaactcacctctgccagaaaatccccccatatcagtttttggaaacattcttcctaatgctcttgccatggagtctttgaagctgagaattttccaccagagataatagtctttaagatgctcagagtgttgctttactctttgaatggtgtgtttccacctccctgaggagttgcagtaatatccccctgacatggagacagggtgcctgtgtctcaccttgggccacagtactgatccatattgataagcagctgtgtcccaaactaaagcacatacaatacattcttccaacaaatatttattgtcacctgttatgggataggcactcttgtattctctggattaggcaataaataaaaactgaccaaaaacccatccttacgtttctcaaacacccaaagtttctaggcaatcacttttgttgttgttgttgttgttttgttttgttttttgctcagaaattttaagcttgataacctcacgagtcttagtgtgaggccccaaaacttttcacgtttctcttgggaaatctaatggtttttcatgcaaatagttaatctctggaagtaagatccttggtgatttgatacaatacatgaagatttaacatttcttgaccacttgtgtgccagacatactgccaagagcttaactaaaattaactcttaaggttgttgtgagagttaaaagagttaatatttgccagacccttagcactaatattgcatccattttatagctaggaaacttggagaaattaaggggctttaccaagtacacatggcaagttagtgaagatactaagataatatataggccgtaagacatcagagtctgtgctaaatactgaagagagaaatgaataaagtgaacaaggaacaaacccctgctgtcacagtgctcacaatctcaagggggaaggcagcaactaaatagtttcagaaaactatgtgcagatgagaaacacacaatgtcacatagtagttcagagtattaattacctaactctaccacaagagcaagttgattaggaccttccagagaaagtgactcttgattggcatcttgaagaatgactagaagttcagcgtgtgggcagagaaggcactggcattaccagcagagtgatgcagtacctttgaagtttgagaaaatatttcacaaccgggaactacaaatggctctgtactgcctgagtgctgaatacagatgggagaatagcagacatgatggttggaaagagatccctagaccgcaggagcccagttacgaaaggccgtttatgcttgcctaggagtttcagctttaccctggagaggtggagaactagtgagagattttatgcagagaaattatatgatcctgcttgcattttggaaagatccttgagtggctctgcagaaacttgatggaagggaaagcaaggatagagacaacaaaaccagttagccaaggaaaaaataagagttcagaaatgaacatggcaaggtaaaaaaatctacaagttttcacattaaacacagactctttcatcttcaaccccagaaaattacgaagtgttctccatgtcttcaatttgctgctcagatccactcgcctcccttcgacgcagtatctgcatctggaagacggacctacttcagttggccaccttgccctctaggttccagctggactcagtcaggacagatcagagagactgaggagggggaggcctcctgcagggtcactgtgaagtacctgtggatgccactgaaatctcagctcatgtctggtggccctttttgccaggctctggtcttaagatggtcctgggtccttactgccactcccagtgtcctctactgtcccttgtggttttcctgcacaaggctatatctttgtaagtggttacataacatttattcattttatccacaattgactgtcctttctatttcctgctaggattctgaagactatgcgagaataaaggaaaataggcattgtcagaatctgttagtaggattataaatttgtacattctttctacagaacaatttgaacatagcaataaaatttttgaatacatgcactctttgacctagaaatttctcaattaaaatttcactcagtggataaaattgccaacataggtataaacccatgtttactgtggtattttttaatgtagtccaagttgcagaactgtatgcttaatattatctttttggtataaaaaatatatttttataaagatacacaacattaatagtgttcacatatgtggaaaaggcctggaggcagagggtggggttataggtagattttgtctcatcgtattcaattcttctaaactgtttcaattaacttttaacaaaaattgtttttaattttcaaagatgtcattaaaattggaatatcggtgcctattttacagcgttgttgtgaataacaaaaatcataatgtattataatagtgattacgtaccaggtctagaggacctggtaataagtggggataaccggaactacagcagactaatggaagtggaagaggtgatgagtttttgagtggtataggagttggaattaccagagatggtgattattcaagtagcaagagtagggcatatattgcatatgaagaagaaagtattatacagtgattttcagttatcacttaagcaactgtatgttggatggctccattcactaaaggtaaaatgcaccaggaggtagagatttgggaagggagatgaagaatttggttttgcataatggagtttctggtgcctgtgggatatccattgggttgtctaggaagcacttagataagaaaaagtcaaatgatctcatggcaagtaggccctctctaccctgaaacatcattgtctgggagtaagaattcaaaatcagttagaggttataagagccttttcttagaatccctgctgccaccttggatttcttttccttttttcagtatacttatttttcctttttcagtctttagggtaagtgtcattgcttctaggctttggctgaaacctgtgtccattaatgcaatttagtctactctggcaaactaagatataccaacacattttggtaactaacaatgcaattcaacttgtttcttggttcttgcttgttctgtaatacagtgtatttttgcactgagaaggttttcattatgttctactgttgtatatttcattgatatatttatgttgataatttttactttttcttgtcatattttctcatgggaaaacgtgtgatacttttaatataagaaatcatcttaggctgggtgcagtgactcacgcctttaatcccagcagtttgggagtctgaggagggtggatcacctgaggtcaggagttcgaaaccagtctgactaacatggtgaaaccccgtctctactaaaatacaaaaattagctgggtgtggtggcaggcacctgtaatcctagttactcgggaggctgacgcaggagaatcacttgaacctgagaggtagaggttgcagtgagccaaggtcgcaccattgcactccagcctgggtgacagagactccatctcaaaaaaaaaaaaaaaatcatcttatatctatctcaattagaactagaggcaattttaatgcaaaacaacaaaagtaagctgtgttttgaagaaagcttgccaaagcaagtagtggaaataaatacattatatgtatttcccacatctctatgtagttattaatactttattaatttaaaacctcaggaacatgtttacatgtaagttatgctaaagcacaaaaaggaagtagatgaaaatttgttaacttatttactaaatccttccacaaaatacttttttaaaataaagggattatagatcagtaatgtcaagatattctgcatagcttgtctttatcaaaataagggatctttttattaaggcaacccagaaagggtggatttatggattgaagggagtatgtttaatatgtctgtatccatctagattgacagttctcacagacatgaatttccccagagagacagtgttactggtgtcagtggatggcatcatttacttcaatgttccattattaaactgataacaagataattcctctgcttcccagagacatgacagggtttacaatggttaacactcttattgtatgggactcaatgttctaggtagtttttaataagaagctcatttgtatttcaatattgaaaaaaattaaagtgaaaacaacatcgtaaaataaattcaaaatcaaatatatcaggcaacacaatatggctatttaaagaatttttgcttactatgtgtagctttgttgaaaagaaatgaacatttccttcaatctttcagctcaattttactaaacagtaaaaagcatatattagagtatgttatttgttgaaattgaaatttacatatttggttgattatttgaatgcaagacatatataataattttagataattacaggggcagaggaagtagctaatattggttgagtgcttttaagttttcactttaaaatacagatataaaagaagcaatggagatagagatagcaatagagacagagatataaatagacaaataaacaaatagaaatgctttaaaaaccaactcaacaattcactaagacaactcttattaacctcatgttacagctgaagagactgagggtcacagaggttacttaacttatccaagacattatgaagcttacccaagatccacagctagtaaatgtgaaagcccatgctcttttactagattatatggcctctcttgtagggtttagggaaatatgttcatttttaaataattaataatgtgccttaattagtaataattttaaaaaggaacatatttctccagctagcaagcaggggaaatagtagtcagacttcactatatctggctccagatctttccagacactcttttgaaaattgaaattgtttaattaatatttgtgtggctatattttatttgagggtaaatgctgacaactaatccttaaggctgcacatgaagcgaaggtctacctaaaagggggttcgatgagcacctctgggttaaggatatctcaggaggatattaattaatcctgccattccagtgatgagtggagcaagacttttgcatttgtttaaaattgtgttgtgtttgcaaagagctttataggtcatggatccctaatgatttccagacagaattcttttctgtttcaccaagaataatgtgaagctttctaccacaggcaatgccaactgctgactaccacagaaatacttcaagagaagtgatatatcagtggcttcaaagtattctaggatccatttctgatggaagcatgtcactgtataccttggaactaaaacagaatagcattttcaaagttaaaaatgagagaagtccaaacatttgatatctaatggataaagaaaatcagagagtaaaacattttctcagtcattgattctggaaggatatagcaccatacacagtcactggatacatttcctttacctatcccaaattatagctccacatgaactattgacaagactataaatttctgtactacattacatgaatgagagattaatttatgtgaatttattccttgttggcaaatggaatgacacagtttgaagtcctttccgagctataaggaattagattgccctttttataaaggattctatattatgacatgttttttccagattcttgacaaaaagcaatttaatatcaaattctgacaaatgagaactgaaacatcaatggttcttaagcattaatattattggatttctcttgctagatatgtcatctccttcatcttttttattgtaagacaggtattattgaatagttaccttatctactaatcaggagtacgactcataaatgtataagacattatatacgagaaaataaaacttataagaaagagaccccaccatcaaaggagtataaacttcttgggaagacaggacaaacacatagaaattaacaattaattttaaaatgatattacttcctaaaagccataccctgtacaagctgcacatgctataggagtaaacatacctgttagtgtaccacaatctttatcacagagaatggatgatgcagcagaaatgtccaaaaaatttatcagtaataaagcatggaaaatgccacattcctcataagtatctcattcaaatatggacaactcaggaagcatagtattttttaataattgtaaatgaaggccaggcatggtggctcacgcctgtagtcccagcactttgggagaccaaggtgagcagatcacttggggtcaggagtttgagaccaacctggccaacatgtgaaaccccacctctacccaaaaatacaaaaactagctgggcacggtggcctgtaatcccagctactcgggaggcagaggcaggaaaatcgcttgagccctggtggcggaggctgcagtgagccgagactgcaccactgcactccagcctgggtgacagtgtgagtctctaataataataatataattgtagatgaagtgttatttcattgaggctggagattgtgaaaaagatcctgattcatttagataggatcaatgactgtgctacaacagttgcttaaattaagaaagtctgaaaactatgtgtgttgatagtaattttcccagcttttcattctaccaatgtcctagagttttgtttgcctttattctggttttgtagagttttgtttgcttttgttctggttttgtttgtttgtttttcccgtaatgaaagttttctccttcttcttttatagctttaggaagggtagcttcataggaagtaaaaacagccatgctacttacacagaaactcatttgataaagaaaatattagctaaaagtgaaataagttaatgagttttttaaaaaaagaatgagatagtctaatgaagattatttgcagttgcctaaaaaaaagatttgctgacaatgttatttaggatgaatagatggaagaagctggccctgccagccaaactaaaagccaaacacaatgccaggcaatattattgcttcagtactgcttactgctaggacgcctagtaagatataggctgtgaccctatttcgcacctagaaagacttaactaagacattttctagctacagcatattcagtgaagaatacaatctcttctacaaataaataagagtccagtaagaaatgaagtgggacagagtaattctatataagaataaacactgttaaggcaagagtgtatttagaaggtgagcttcctacatttatagttaaaaacccaaatgaattttctattctgagccccctctgatgcacatcagaaaaatggcaccatgaaaccactgcttgaccgaaactgtacaagtcctataatacatgaaatgtagccactaattaattttgaattatttttatgagatttcttcaagaccataagatagggataatatcccatattactgagcttcacagcatctactgtatatttgccttaaatagtattttgatacagtgagtccttgaatggaaattgtctactcaaccaaggctgataaccaactgatagactaattgtaataaattataatttgaaaagaaggcattttcctagactagacaaaaatttgccatcaaatgtgtatattggtatgtctccttccaagttgtagaatttttaatatgtgtgtgtgtgttttttgtttttttactgttcttttagtttttttgttttgttttatttctttttgttgagtagttttgtctcataggtggctatttctgagtgaagtcactggggcagttggttgaaggaaaagtgcatatgtacttgtatatattataatctacatataacttctatgtatacatatgtatgtattatttatatataatttggtgtgagtatgttgtgcacttaagaaatgcataaatctctctggcttggctgatagttacctaatgagaaataatactccaagtcatgaaaatatgttgaaaaaaaaagaggataggaaattgcttagcctgatctaggggtataattacgagtagcttgagggagaaattgaaagacaaaaactagcttgtaatcccagcactttgggaggctgaggtgggaggattgtttgagctcgagttcaagaccagcctgggcaacgtggtgaaaccctgtctctacaaaaacaacacaaaaaattaggcaggtgtggtggcatgggcctgtagtgtccgtagtcccagctacttgggaggctgaagtgggaggatcccttgagccagggaggcagaagttgcagtgagccgagatcaagccactgcactccagcctgggtgacagagccagaaccagtccacaaacaaacaaacaaaaaaacaacgaaaaactcttgacagtagctacctctactatattgtgaattcctcctaaatagatagcaaaaatccgcattactcttaaagcatactgatggaaacatttaatgctataatgtagtgaatagttctttagtagggagaagatggattgggtgacacatgaggttgactacatttgtatctccatttttttctatctgtccctcactgagcagagaaaacgcagcatggtctcaagaaagaacatcatggtgccaaaagaagtttccactcagcctttacagtctgcattcattcttttatttagtaaaaatgtaagaggtttttgttttgctttcatactttttgttccaaatatggggccagggaccatttactctttgttcttggtagttgaaaagtgtagcatatgataaaccctttcattgaataggcattcatgatcatggatgtgaaaatgcattagaagaatttatgagacatgtggggacataggctgcatctgagactaaaatcctcatcacaggcttttatggcattctactatgatgactcgtttagggtggtgtgggggaaggacacctttctgttctttcattaaatgatagaccaagtggagttggttgtaaataattcagaaggttctgaaccagaatttgtcttttaaatcaagtgattctagaggctgttcttgctttattctaattaatgaaaacaatcagtgctatagattttataatgctctttgaaaatacatagcaactctcaaaacaggatgcatttaatgacccaaaactgtagtcgtacacttttttcctaaaacttaattgtccatactttcatataataatttctaagacaaaggtatgcttatacatttatattttaaacagacttccaaattgacaaatttttatggtataaaaaatgcataatctgctcttagaggactataaccccataaagttacttcattttgaaaggatacgtttctcctattcgttttgtaagtttcaaagatcatgtgattatgtgtgggagaagggagaaaaaagattgcaaaacaaaccccttattgtagtttcttagaaacagcattgatatcaacatttgggcatttgtgagcaagctggaaagtatgaacaatgagaaaaaggcacatttaagggagtaaatagtttgttttcaagccttcagtgtattatcttcaaaatgcgtcaagttttagactatgagaacgtccttcagagtttgctttggactacaactgcaaatgcattgattatagttaaatgtgactttagttcagcacttgaaatagctaacattcacattagaaaaaaattatgaaatgactagttgaattgaagaaattggggaattttcctcccggtatgcttaatgaggtgtataccctttgcatgcattgtaaatattagtgcatgtgtattatcatagaagtatataaatatggcttgaataccatttcttgattttaattagatcacattgccttttgaatatccttatttaaacaggtaatatgaatttaacaggaacttgttgtacactctgttttatttttatagtatgcaaataagaaacaaatgccaacacattcattatgctgtttaacgtctataccagaaaggttccaatcactttgaaaaaggtcctttcactacttctactctaaatcactttgtcatgcttctgagaagaaacattttgaactgaaatttgtaatgaagattaaaccctatgatgttttaaaaatgtgggaaacatttttggttgatccctaagcatcaactgcatattaaggcaaaggaatgatttatgagtattcaatgataaatgaatattttattattttagtatcattaatcattatcctaagtagtgagacatgttagaggttgtttttacttttttttttctattgttgtttactggggtgctcattgttagcaggattgacagctcaaaatggaggtggaagctcgtgaattcaaacgtggaaataccttcttgtacagaaagatcttatagagatgagggaaattgtagtgaggatggaatatgataaagtgggaggaaggagagcagaaaaaaagtgaagttgacttgatttgtgcaggaatagtacacaggatcattagcttattcattcactatttacactgagcttcattattgtgccagctcagagatgggcattgaagatgcagtactgaaggagatgatctcacggggaaaaagaggatgagtattattgaagtgcataggagacagataagtgcaatgaaaatctttatgtctcatgtagagcctggattggaaaagaatcatccagctgcgtgatcagaatgcatgccctttagaccattcaggtaaagaacatgattcctagttttgaccccaccgtccattctttcctcacccaacattgtagccattcccagctcactattctatctttgacgtagtatctgtttgcaatagtggccctctatgggtccttcaaatcagagaggcacacatgtctggggctcacagttctaggaactttttctgtgtaagtaggacaaaaatttttaatatcaattctgctcaagcaatgtaaactaggaaacataatttgctaaaaagtgatgttacatattggtgaattttctagcattttggttaaatctaaaaataattttaaaatatttataaaatataaatctatctataaactttggttctatagctctacttcttttttaaactgcattaattcacaaatataatatgctcacaatgtgacactacagaaagatcaaaggagcatataaagatgatgctttttaccctttccgatggcatattttttaaagtcttatctccggatgtttaaaaccaaagtattctgctatttcaaaatgtcattgtttgcactctagctaaattgtagaaaaaaggcaaatctgaatatgacattattctttcagttatcaaaataatcgttgaatttattgaaaactatttaatgtcaaatatacaatataattctaagaacagtcctatgaaataagtatggcaaccaaattattttcattttatatatcgggtagctgatgcaaaaagactttcaaatgatatgttagtgtctaattattcattccacaagtatttacagggcatctactctatgtcagcagtattctgtatccaaaacaaagattctcactttattggagcttacatttcagctgcagagagaaagacaataaatatattaaataagaaaatgatataatagaaagttctatggaaaataaaatagagctgggaggaggtcgtttgtagtttttttttttcttcttcttcttctttctttttcttttttgagacagattgttgctctaccacccaggctggagtgcagtggagccatctcagctcactgcaaccttcacctccccggttcaagcaattcttctgccttagctgggattacaggtgagcaccaccatacccagctaatttttgtatttttagtagagatagggtttcaccattttggccaggctggtctcaaactcctgacttcaggtgatccgcttgcctcagcaaaaaggtgtgagccattgtgcctggccctgtagttttaaagagtgccactgagacagtgacatttgagcagaggcttaaagaagatgtggaagaacaccatgtgtatgtctggggaagaatatataaggttgagcaggcagccaaggtagagtctctcaagtgggagggtatgcaacatgtttcacagtgaatgaatctaagctttcacttagaatttctgtgaggtaataggatagacatagttggaaaagagtaagttgtgtgtttttacaagtccttgactttttaaagcattgcatttaacaagcattaattacatctcaatgattctttcatttgttcttgattcaacaaatattatctcagttcctactatgtatcaggtaccttgataaaaaggaccagcaaattaccacccacagggacatgatgagatagaagacatagcccatgttctctaggagcttaccatacattgcctaagacacagtaccactcttgtacccaccaggattatctaattgaacatgcattaaactttcaatcatagttaatgagagcaaagagctacgtctcataaaataattataataatattatttacataaaatcatatttggggaatttaaaatctttacggaaaatgtttaataatctttacaaaacccatgtgcttatatgtattgtattagtcagcgttctctagaggacagaactaataggatagatgtatatctgatgtaaatatgaaggggaatttataaaggattattgactcacatgatcataaggtgaagtcccatgataggccgtctgcaagctgagaagcaagggaaccagtccaagtcccaaaacctcaaaagtagggaagctgacagtgcagccttcagtctgtggatgaaggcccaagagcccctgacaaatgaatagtgtaagtccaagagtccaaaagctgaagaatttggagtctgatgttggagggcaggaagtgtccagcatgagactgaaggccggaagactcagcaagtctgctctttccaccttcttctgcctgctttattctagtcatgctggaagctgatcagatggtgcctacccagattgagggtggctctgcctctaccagtccactgaatcaaatgttaatctcctttggcaacatcctcacagacacaattaggaacaatacgttgcaatccaatccagttgacactcaattttaactatcacaagtccaccccttgtcaacatgaacccatacacatctcctgaaatcatacataatctccaaataaagacaataataaggtcataattacacagctattctttgcacaaccagaagtgcattaatccttaccctaattgctattacataaagttaacacttaaattcttatatgaagtcaataaatcttacatcacatgataaaggaaaaaaggaaataaaatgaagatattttcctagtaaaagtgtatacatgcacaaacatgttcttaacaaaataagaaggaaatactcatgacaattacagtcctcatttctgtagctggtcacgtggtcgtaggtggtattgatgactgccttcttctactacccattctttattccctttgccttcagcaagcacctcagcaggtcatggttttttgcctggttgagtgacccaaatcttcattcctaaagagtctgggccatttatagtccagcctggattgggttgttgtagtttcccattgacgttaatcatagggcatggtaatagtaagagatgccctaagggatctcctgtattccatgcataatcttccttatctccgttgtggagtagtagactgatttcatcttgataggctgggtcaatcaccccagccaacactataactcctttcttagactgttgactgagaggtagcccaaaatggccaggtggcaatcttaacttgcagtttaatggaatcgttgttgtgtctcctggttgcagcattatttcctctggaagtaaggcctctagaccagctgaacataatgttgtgggaacaggaaggaaaacttttgctagtgggtcactaagggtgatggtgagtggtgtcacttctacttacaccccttgattcctggacccatgtatcttgactatgggaggaagagtaccgtgtattggatgctgattcagagcatacacagccttctggagaactttgccccagccctgtaaagctttgtcacctagttggcattataattgtgacttcaaaaggccattccaccattctattaatccagctgcttcaggctgatgagtttctggccacagggacatgatgagctagaagacatagcccatgtcctctaggagtttgccatccgttgcctaagacacagtaccactaatgtacacgccaggattatctaattgaacatgcattaaacatgcaatcatagttaatgagagcaaagagctaaatctcataaaattattaaaataagtattgacatagaattttattttgggaatgtaaaatctttaaagaaaatgttttaataatctttacaacacccatgtgcttaaatgtatggttttggaaaatgtacccagactatttgatgttgtgcatcattccatgtaattattttaagagttttcattattttattattaacctcttttttattcctatgttacattttaatactacattaattattaacctttttaatttagaaaggtagtttattaaatgaatatttgttaaagcctctgaaaggaagtttataattggaatataaatgcataataacacattttaaatcaagctctttatgtgccattgaaaagctctattcctaaatgaaccataaccttgcaggtactatatcatgaccttttaaataaaagcaaagaaaatatcatgcacagattttatgtggaaaacacacctttttgtttgtgtatagtgcattcaaatcttatgactttagttgacttactacagcctcaatgagagctcaaaagtgatagaacaactcaaatggatattgtagattaatatcaataccagacatgctatgaaaacagtgaatgacttataggcataaaaatatatgatagcttgtttccggttacacatgtaaggtacttggaagttgccactccatcttaacaagtaaaacgctaaagagctaatttacaccccaccaacagtgtaaaagcgttcctattgagaactcatggacacagggaggggaacatcacacactggggcctgtcggggggtggggggctaggggagggatagcattaggagaaatacctaatgtagatgaaggattgatgggtgcagtaaaccaccatggcatgtgtatacctatgtaacaaacctgcacattctgcacatataccccagaacttaaagtataataaaaataaataaataaataaataaaaattcctgatgtctgaagaaaaagaatattttaaaataggttttattctataataaaataaataagatatacttaaaaataaaaaataaattaataattttaaaaaaaaaaaaagctaaagagactaaaaaccaacagctcttcttagattgtaagagatgggaggacttagggcaaaactgctacgccaaggttagagagatagacaggcaaatatagggaactatggcttactgaagcagagactcactagcggaaaccacatcaggatccaggaccagcgtaggaaaacctgaactataattgatgaatttctggaggatcagtgcagacaagtctgagagttaaaaactccaggagggcccaggcataggggacaccaaggatattgtgagatttatctagagaagcttgacaaacttctcaaagtgagtattagagaaaattcccccgctgcttctggcagggggaagagaagaagaaccatttcataatatggcagagcattctgtttttcttaacaagacctaaagagcaagaatagactggagttaaatatttgaagtattaagagggccaggcacagtggctcacgcctgtaatcccaaagctttgggaggccaagatgggtggatcacttgaggtcaagagtttaagagaccagcctggccaaatggtgaaaccctgtctctactaaaaatacaaaaattagctgggcatggtggtgcatgcctgtaatcccagctacttgggaggctgaggcaggagaattgtttgaacctgggaggcagaggttgccatgagccaagatcacagaactgcactccagcctaggtaacagagtgagactctgtctcaaaaaaacaaacaaaagaataaataaataaataaataaagtattcagagaaaaaaactcaccaatgtagaattatatactctgcaaaattattcttcaaaagtgaaggagaaataaacactttctcagacaaacaaacattgaaagaatgtattcagaataaacctccttgcaagaaatgttaatggaagtttttcaagagaaggaaaactatataggccagaaacttggacctacataaagaaaggaagaacatcaaagaaggaataatttaaggtaaaataaaaatgtttatttttcttactcctaattgatctaataacaatttgttcaaaataatcatagtaacaatatatttgattgtgtatacttacgtataatatatgtgcttatgtatacctatatataagtccaatgaatgacagcagtgacacaatggacaggagggaggatatgatttttttattataagatgctcatatcatctgtgaagtggtacggggttatctgatggacttggattagctatagatgtatattgtaaactctagggcaaccactacaaaaagtaaaaaaaaaaaaaaagtacaagtgatatgctaaaaagaagtagaaaaaaattgaatcacataaaataatgaaatacaaccacaaaagacggaaacagtatagaagacaaaataggaacagagaaaaaaatagaaaacattaatcaatatagtagatattaatccaggtatatcaatacttattttgaatatcaatgatctaaatacgccaattaaaagacaaagattgtttaagtggatttaaaaacccacctatgtattgcgtataagaaagtcactttcaatacaaaaacacatagattataagtaaatggatgaagaaaatgtatcatgctaacactaatctaaagatagcaggagtagccatattaatttcaggcaaagcagacttcaaagcaaggaaagttatcagggacaaaagaagggtattacataatgataaaatgatcaattatccaggaagacataagaatctttaacgtgtatccatctaataacagagcatcaaactatgccaaggaaaaaccaatagaacagcaaagacaagtagtgcatctattagcatagttggagactacaacacttctctgtcagaaatggacagatccagcaggtagaaaatcagtaagcacatagttaaactcaacaacactattagtcaactggatataatttgacatctatagacaacaacattcaataacagaatacacatttttctcaagtttacatggagcattcaccaagatagaccacattctggaccataaaacataccttaaattttaaaaggacagaaatcataaagtctctgatctgagaacacaatggaattaaattagacaccgctaacaaaatatatctggaaaatcccaaaatatacagagattaaacaacacacctctaaataacacatgggccaaaaacgaaatgtcaaaaagcattaaaaatattttgaactaaatgaaaattaaaagaaaacttatcaaaatttgtgaggtgctacaaaagtagtacttaaagggcaatttatatcattgagtgcatatattaaaaaagaagaaagatttaaaattaatgacctaagtttctaccttaggaaacagaaaatgaaaagcaaatttagtctaaaataagcagaacaaaatgaataataagaattagcaaaaatcaatgaaataaaaaaaatcaatatagaaaatcaacaaaatctgattatttgaaaaaagtcaacaaaattgataagcctctagccaggctaatgaataaaaagagaggacataagttaataatatcagaaatgaaagggtggacatcactacgggtcccagggacactaaaaggaaaataaagagtgctatgaacaactccatgcccacagatttgatgacctggattaaatgaaccaattccttgaaactgccaaaactcacacaggaaaaatagacaatcttaatcagcttatatctattaaagaaatcaaatcaataattaacaaccttccaaaacaaagcaaaagacccagatgggttcactatttaattctactgagcatttaagaaaaattcctaccaattctctcaatatctttcaggaacagagggaataccgatagtctcaaacttagaatttttcaacttcaagatgatgcaaaagcaacatacattcactacactcctcgacttacaatgggatatgtctagataactccactcattgtaagttgaaaatctcagaagttgaagcacacacttttgacttaacaatattttcagtttattacagccttatcaggacttaaccccatcgtaagtcaaggagcctctgtactttttaactgattatatgaggccctaatacctaataattgcactgacagcaaaccagacaaagacatgctagaaactatagaccagtatctcttaagatgcaaaaatgctcaacaaaatattagcaaattcaacgcaacaatgtataaaaagaattatacaccacagtgaagtgggatttatctcagacattcaaggctggttcaacattcaaaaaatcaggtaatgtaattcatcacatcaacagactaaaaaagaaaaatcacatgattttatcaacagatgcagataaagcatttgacaaaattcaacacccattcatgatcaaatctctcagtaaactaacaatacagagaaacttcctgagtttgataaagaatatctataaaataccttcagctaatatcacatttaatggtgagaaattagaagttttcacactaagatcaagaacaaggcaaggatttcccctttcaccatttcttttcataattatactggaacttctagctaataagacaaaataaaggtgggaacagggtatacaagttatcaaggaaaaactaaactgtttttgcagatgacattattgtgtacatagaaaatcagaaagaattgaccaaaaaatatcctgtaactaacaagtgattatagcaatgtggcaagattaaaggttaatatacaaaagtcatttgatttcttctgtaccaacaatgaaaaagtagaagttaaaagaaacataatattatttacattagaatcaaaacaaatgaaatacttaggtgtaagtctatcaaaatatgacaagatctgtgtgaggagagctacaaaactctgatggacaaaatcaaacaagaactaaataaatggagagatattccatgttcatgtataggaagacagtactgtcaagatgtgagttcttcccagcttgatctatagatgcaatgtaatcacagtagaaatccccgcaagttgtgttgtgggcattaacaaactgattctaaagtttaaaggcatgctagaagacccagaatagctaacacaatattgaaggagaagaacaaagttagaggactgacactacctaacctcaagacttactataaagctacagtaatctgacagtgtaatattggttaaagaatagacaaatagatcaattgaacaaaaaagacatcccagaaatagacccacataattaaatcaactgatttttgacaaagcagtaagacacttcagtggagaatacatagtaatttaccaaatggtgctggaacaactgcatgttcacatgcaacaaaaaattaatctagacacacccttcaccaaaattaactctaaatggatcatacatctaaatgtaaagcacaaaaatataaaattcctacaagataacacagaagaaaacctagatgatcttgaatatgttgatgacacatgtgtttttaaatacaactccaaaggcaatattcatgaaagaaattattgatacgctgggtttcattaaaataaaaaactctggctgggcgcagtggctcacacctgtaatcccagcaatttgggaggccaaggcagatagatcacctgaggtcaggagtttgaaaccagcctggccaacatggcaaaaccccatctctactaaaaatacaaaaattagctggacatgatggtagcctcctggaatcccagctactcaggaggctgagacaggagaatcgcttgaatctgggaggcggaggttgcagtgagcagagattgtgccactgcactccatcctgggagacagagcaagactccgtctcaaacaaacaaacaaacaaaaaaaaacttccgctcagtgaaagataatgtcaagagaatgagaagacaagccaccgactgggagaaaatatttgtaaaagatgcattggagaaagtacggttatccaaaatacacaaagaacacttaaaactcaacaataagaaaacaacgaaccagattttaaaaaatgagctaaagactttaacggacacctcatcaaagaagataaacagatagcagataagcatatgaaaaggtactctacatcatgtcaggagggaaatgcaaattaaaacaacaatgaggtaccactacacatctattagaatagccaaaattcataacactgacaacaccaaattctgatgaggatctggagcaaaggagctctcattcgttgctggtgggaatgcaaaatgatttgatcacgttagaagacagcatgtgatctcaacaaaattgatagagcactagcaagactaataaagaagaaaagagagaagaatcaaatagacacaatacaaaatgataaaggggtatcaccacccatcccacagaaatacaaactaccatcagagaatactataaacacctctacacaaataaactagaaaatctagaagaaatggataaattcctcatcacatacaccctcccaagactaaaccaggaagaagttgaatctctgaatagaccattaacaggctctgaaattgaggcaataattaatagcttaccaaccaaaaaaagtccaggaccagacggattcgcagctgaattctaccagaggtgcaagaaggagctggtactattccttctgaaactattccaatcaacagaaaaaaagggaatcctccctaactcatttaatgaggccagcatcatcctgataccaaagtctggcagagacacaacagaaaaagataattttagaccaatatccgtgatgaacatcgatgcaaaaatcctcaataaaatactggcaaactgaatccagcaacacatcaaaaagcttatccaccatgatcaagtgagcttcatccctgggatgcaaggctggttcaacatacgcaaatgaataaacgtaatccagcatataaacagaaccaatgacaaaaaccacatgattatctcaatagatgcagaaaaggcctttgacaaaattcaacagcccttcatgctaaaaactctcaataaattaggtattgatgggatatatctcaaaataataagagctacttatgaaaaacccacagccaatatcatactgaatgggcaaaaactggaagcattccctttgaaaactggcacaagacagggatgccctctctcaccactcctattcaacatagtgctggaagttctggccagggcaattaggcaggagaaggaaataaagggtattcaattaggaaaagagtaagtcaaattgtccttgtttgcagatgacatgatcgtgtatctagaaaatgccatcatctcagcccaaaatctccttaagctgataagcaacttcaacaaagtctcaggatacaaaatcaatgtacaaaaatcacaagcattcttaaacaccaataacagacaaacagagagccaaatcatgagtgaactcccattcacaattgcttcaaagagaataaaatacctaggaatccaacttacaagggatgtgaaggacctcttcaaggagaactacaaaccactgctcaacataataaaagaggatacaaacaaatggaagaacattccatgctcatggacaggaagaataaatatcgtgaaaatggccatactgcccaaggtaatttatagattcaatgccatccccatcaagctaccaatgactttcttcacagaattggaaaaaaactactttaaagttcatatggaaccaaaaaagagcccacattgccaagtcaatcctaagccaaaagaacgaagctggaggcatcatgctacctgacttcaaactatactactaggctacagtaaccaaaacaacatggtactggtaccacaaaagagatatagaccaatggaacagaacagagccctcagaaataatgccacacatctacaactatctgatctttgacaaacctgacaaaaacaagcaatggggaaaggattccctatttaatacatggtgctgggaaaactggctagccatatgtagaaagctgaaactggaccccttccttacaccttatacaaaaattaattcaagaccgattaaagacttacatgttagacctaaaaccataaaaaccctagacaaaaacctaggcaataccattcaggacataggcatggacaaggacttcatgtctaaaacaccaaaagcaatggcaacaaaagacaaaattgacaaatgggatctaattaaactaaagagcttctgcacagcaaaagaaactaccatcagagtgaacaggcaacctacagaatgggagaaaagttttgcaatctactcatctgacaaagggctaatatccagaatctacaaagaactcaaacaaattcacaagaaaaatacaaacaaccccatcaaaaagagggcacagcaaatgaatagacacttctcaaaagaagacatttatgcagccatcagacaaatgaaaaaatgctcatcatcactggccatcagagaaatgcaaatcaaaaccacaatgagataccatctcacaccagttagaatggccatcattaaaaagtcaggaaacaacaggtgctggagaggatgtggagaaacaggaacactattacactgttggtgggactgtaaactagttcaaccattgtgaagtcagtgtggtgattcctcagggatctagaactagaaataccatttgacctagtgatcccattactgagtatatacccaaaggactataaatcatgctgctataaagacacatgcacacatatgtttaatgtggcactattcacaatagcaaagacttggaaccaacccaaatgtccaacaatgatagactggattaagaaaatatggaacatatacaccatgcaatactatgcagccataaaaaataatgagttcctgtcatttttagggacatggatgaagctggaaaccatcattctcagcacactatcgcaaggacagaaatccaaacaccgcatgttctcactcataggtgggaattgaacaatgagaacacttggacacagggtgtggaacatcacacaccggggcctgttgtggggttgggggagtggggaggaatagcattaggagatatacctaatgtaaatgatgatttaatgggtgcaacacaccaacatggacacatgtatacatatgtaacaaacctgcacattgtgcacatgtatcctaaaacttaaagtataatttaaaaaaaaaaagacagcatgtggcagtttcttgtaaaactacaaatactcttaccataggatccaacaactctactccttggtattaacccaaaggagttgaaaacttatatttccacaaaaacctgcacatggatgtttacagcagctttattcataattgcccaaactgggaagtaaccaaaatatccttcagtaggtgaattataaactttggtacatacagacagtgatatattatttagtgctaaaatggtataaatatcaagccatgaaaacatggaggaagcttgaatgcatgttactaactgaaagaagccataatgaaaaagctatatactgtgtgattccaattatatgacattctggaaaagacaaaactatggtgacagtaaagaaatcagtgataggcaggagggttgggtggggtgaggaagaatgaataggtggagcacagaaaatttttaggaaagtgaaaatactctgtatgatactaaaacaatggatacgtgtcattatacattgtccaaacccatagaatgtgtaacagcaagagtgaactctgatgtaaactgtggatttgtatgatgatgctgtgtcaatataggttcatatacatataagacataccatatatatatctgtcatacatatgtgacagctgctactactactacatgactacataactactacagtctacacagtagtagtcatgatcttttatacatgcgtatatattagtcatggtagtttcctgcatgcacttttgcttgtagcaagtattacaatcttcatagggatgaaacggaaggtttaaaaaatttattaataataagccatctttctttccaccaacatttactaaattacattaggtgctaggcaatcctgcaccaaatgataagaaactaaaggtggataataattagcatgttctcacattgagtgaggtaagagaagtgggacaagagaagagaagtatataaataaacatctatctgacacagtccaacaggaactgagtagtggttggtgtagcacacttgaatattaagagaaagcagtgattctgtctctgagatcattgaggatgatacagttgaggttagctctgagttagaccttgagaagtaggtaggagctgtacagtcagacgtctaggatggcactacaagaaggaccaatatgaggaaaagaatggacatctaaaagtacatgtggcatgcggtaggcagtatatataagaggttcagtttgatatgtcaagataaggagcagcaaggtgatttggagccagattataaagggccaatactaccctatcatcagcccttaacatgcagtaatggtcaggaagctgtgaatcatcccattggttcctgctcactcattctttcctctaattttattatttcttaggcagttccatctgctggtctagcttagatggtatgcagagctgtagtgaaataactcactggcgaagatcatataaataaggttagcctctgagaatgaatataataaaaaactgacacacattgaataaaattaaccatctataaaagtaaaccaacacattttctataaaggttgtataaggagcacaaaaaaatcattcaaagtataaatattatagtcaaacagatcaagctttgtatctactcttattagccatgcaactgtgagtagttatttaacttcttgaagttttttttttcctgtctgtaaagtggggctaataacttctatgctatgatgttctaaggattagagataagtcatgtgaaattctaaacatagtactcagcatatgcaagtacacagcatgtaatagttcttattgtggtacttagtaaaagtggcatcagttagcttttcctatataacaaaatacctcaaatttgggattgaaacaattattaatttagttcttgattcaggatgttagcaatttgcttaactgggctatgctgcatggttcttctggcctcacttggtcttatgccatctgtggtcaagttccaggtgggctagggactggctaatctaggtcagcctcagctggatggcttgtctgtgtgtcatgtggtctgtcatccttcaggaacctatgctggcttgtcgtcttggtaggatttcaagagagtaagcagaaaagcaccaggccccttcaagccttggtttaactctggtacatcatcacctctaccatgttctactgattaaaacaagtcacaaaatcagcgcacacccaaaggttgggtagataaatgcccccacttgatgggagtccttccgaagtggcatggaaaccaggagggaacaattttttcaaacaatctaccacgagagggttgaagacataaaatcaactagaatctctaatgtaaattgaaaggataggaaatcaatatggtatagtcttgatgtagtagagaggaacttggaatcaaaagacctgagcttaatccctgcctttgctattgattaacttgaccctggtaaagtaatttaaattatccatgcctcattattatcagtataagattctccaaattcaagattgttgtgggggataaatgagataatgtatgtgaaaatctgtactaaactgtaaatacagaaacaaatataatgaaaaattatttttgatataaaatgtactttataaattataaaaggatctagaaccccttacctttaccatctatgtgtccttattctgtctctagaatgtagaaaggcacaatatatattaaaatatataatttaaaaatatataaaatatataaacaaatacatgtcatagcagaaaaatgcaaaggatactgaggaatctcagaagaggggtgccaaaggaagtcagaggagcaatagggcacaggagaggcatcccagaaggcaatgtctacatgagaagcacgaatttactagagaaaatgatcgaaaattcaaatccaaatgcttagctgattagaaaccattgttttgtcccttacctgcataaaccagattcctacttagatatcttgcttcattttttatgaaacgtaaccatttgtttcaaagtcagccaaattgaactacctgagatttcttaaacacagcatattccttaaatacaccatcctttgcttttgatcttgctgctcactctacctggagtactctacctccttggattttgaaatcaatttccaatacagacatacctcattttattgcaatattgctttttttacaaattgaaggtttgtggcaatcctgcttctaacaagtctattggtgccacttttcaaacagcatacactcacttcatgtttctgtgttcatattttggtaattcttgcaatatttcaaacttcttcattattgctacacctgttatggtgatctgtgattagtgatctttgatattattgttaagtgctttcaggtgccacgaacacccgttgaatatggaaaacttaattgataaatactgtgtgtgttctgactgctacactcatgggcaaatccctcattccgtcagtctcttcaggcctccctgttccctgagatgcgacaatattgaaattaggctatttaaagtacttcatgactaaaacacgaaaagcaatggcaacaaaaaccaaaattgacaaacgggatctaattaaactaaagagcttctgcacagcaaaagaaactaccgtcagagtgaacaggcaacctacagaatgggagaaaatttttacaatctgctcatctgacaaagggctaatatccagaatctacaaagaacttaaacaaatttacaagaaaaaatcaaacaaccccatcaaaaagtgggtgaaggatatgaacagacacttctcaaaagaagacatttatgcagccaaaagacacatgaaaagatgctcatcgtcaccagccatcagagaaatgcaaatcaaaaccacaatgagataccatctcacaccagttagaatggccatcattaaaaagtcaggaaacaacaggtgctggagaggatatggagaaataggaacacttttacactgttggtgggactgtaaactaattcaaccattgtggaagacagtgtggcagttcctcaaggatctagaactagaaataccatttgacccagtgatcccattactgagtatatacccaaaggattataaatcatgctgctataaagacacatacacacatatgtttattgtggcactattcacaatagcagacttggaaccaacccaaatgtccatcaatgatagactggattaagaaaatgtggaacatatacaccatggaatactatgcagccataaaaaaggatgagtccatgtcctttgtagggacatggatgaagctggaaaccatcattctgagcaaactatcccaaggacagaaaaccaaacaccgcatgttctcactcataggtgggaactgaacaatgagaacacttggacacaaggtagggaacatcacacaccggggcctgttgtggggtggggggagtggggagggatagcattaggagatatacctaatgtaaatgacgagttaatgggtgcagcacaccaacatggcacatgtatacatatgtaacaaacctgaacgttgtgaacatgtaccctagaacttaaagtataataatttaaaaaaaaaagaaaataggctatttaacaactcaacaatggcctctaagtgttcaagtgaaaggaagagttgcatgtctctcactttaatccaaagctagaaatgattaagattagtgagaaagacatgttgaaagctgagatagggcaaaaactagacctcttgttccaaatagttagctaaagtgtgaatgcaaaggaagagtttttgaaggaaattagaaatgttactccagtgaacacacaaatgataagaaagaaaacagccttattgctggtatggagaacattttagtggtctggataacattttagtggtctggatagaatatcaaaccattctagatgcccttaagaacatttgtgaatcatgagaggaagtcagatgtctgcattaacaggagtttggaagaaattgattgcaagccttgtgagggattcaagacttcagtggaggaagtcactacagattagagaaatagcaagagaacaataatgagaagtggagcctaaggatgtgactgaattcctgcaatctcatgataaaacttgaagagatgaggagttacttcttatgaatgagcaaagaaagtggttgcttgagatgaaatctactcctggtgaagatgctgtgaacgttgttgaaataaaaacaaaagatttagaatattccataaacctatttgataaagcagtaactgagttttagagatttaagaggattgaaagaagttctactgtggataaaatgctatgaaacagcatcacatgctacagagaaatctcttgtgaaaggaggagtcaatcaatctagcaaactttattgtcttattttaagaaattgctacagcacccaggaattcgatgccacggtaagctataatcccaccactgccctccagcataggtgacggagcaagaccctatctagaaaaaaaaaagaaggaaaaaaaagagtgagaaagaaaatgctacagctttcagtaataaccagcctgatcaatcagcagctatcaccatcaagacaagacattcctttagcaaaaagattatgattcaccaaaggctcagttgattgtagtgaaaacataacttttatgcactgggaaaccaaaatatttgtgtgacttgctttattgtgatattagttttagtgctgtcatctggaatcaaacctgcaatatcttcgaggtatacctctaaatgtccatgggtgatttcataattggccaagtgttcctgttgtatggtgccttccctgattcacacagttacaaatgattaccctttcttttgctctcattttatcttagttagtattattttttttgtatcaattttcatgtttcctttattatgccatgtgctttgaccattccttatacatttagacaaaagaaacagacatatgatcaagagaattcagcatgcaaattacactcagaaagcaaagcaattcagtgtggtcaaagcaaaagttgcactatggtcttgtatagcctattattttatcctgaaattggatttgaagccaaagtgtgatatgaggaggtttgtctctttagaatactttggcagatagtattggctgaaatcagatatggggcaactaataaggaatcttctgcagtaatccagggaagaaatggtgaggatcttaatgtagtcacaatgaggaacctggagatatttggaaaataaactagagcagtacttctcaaacttccctgtactttaggaccacctagagagacttgaaaaactctgatgcctgcacctcactccatacaaggtaacacagaatccttggaattattattattttttaactctctaggtaatttcaatgctcagccaagtacttggttaatcactggatgtgggcgacaaagataggtattcctagttttctgatctgggacaaaagagtgaaacaaaagcatatatagtgtggataaataagcaaatttagagtggagaaatttaagtttggttttggacaaatggaaattaagtgctaacgggtagtcgtatatgcaattcttgcacttaggaaaaagatgcagtttagaggtatacactttcgagattttctgcatgtattaatagatattatttacagtcattgcgaatatgatgtctagtgaatgcatgtgaaatgagactaaaagaggactgtgagtggactctgggagcatcaacatgtgagaaattgacagaggtagaaaaagaacaccaaaaaaaaaaaaaaaaagaggaaaagtaagtggtatctccaaagctcagttagaagaggggttcaagaaactggaggtggttagtagtcttaaatgctgaagagagtttagtacagatctgggctgaaaagtatataatatatttggtgaggtcactgttaaccttggggagatcagttcctaagcatattggggacagaaactaaataaaaatatattatggagtgatcaaaaggggaggaaaaagcaagttactgtagctcctagagtggtacagtggttgtttcctgttgtgttggaaaacatctctgattttttatagaaactcttgtatattgtttaaatgttacttttctatatttgaaatagttgtgtaaataagacatttgtcagccccaaaataaaccaaaaaatgatgaatttttaaataattttaaaagacaacttgtaagcatactagtctcatttatgaccattaagtaagcaatgaacaaataaaattagaaaagcttattatttcaccttaaatgtcttatagtcaatgtatatatttcaggaatattgcaccaatctcactttcactaaatttgaactaaggcataaaggacatctaaaatttgaatgttgtatggttaattaacatttaataaacttattttctttgtttaaatgtctttgaaaatcaaatgtctcatgctgtttttcctcatcaatgtaatcccagtagtcttaggaatgattttgttgaattgtttgacaaaacctaacttggctgcttgtaatttatagttgttcacccccgtcactttgcagtttttccctactaaaaaatttagattgtcttgaagctgaattgttgactggatttcctatgtagttcacagtatggttacagaataccaaaatagcattgtcaatgtgttttaaaaagcatagacctgaagtcaatgggaatttgacaagacagcctgcatgttattgtaagccattgcaagttttatgttgttcttcaccttaatttttaatgtgtaaactttaatgaaattcagtttttaaaagctacttaataaaataattttatttattccctaaggaaatggaattgtcaaaacaaaaaaagttgaccattaaatttgattcttttatttaaaatttcaaaggatgacaatggaagccatatagcactactttttttttttttgccaaataagcatctgcacattgtttttcacctttgagataccttttagagagaaagaaatatgcaaaatttgattagtaaattatcatactttgcattttatatgcttcaaaatgttaatgtctcatagaaattagatgtttacaaaaagtgtatacattttcttaagttgtattaattagtcaaaatgaaagtcaaaactattaaatactccaatttaaaagtattttctacgaagcagaattcactaaaagaatggcttttcaggagcatatcaaattttaatgacttaagcactaaaaagcatcttgataagatgggtctcaactctaagacaatctataaaacccaatttcatgttttcagtaatataaaggggactgtaatctgtgttccaactttgtaaatcaacttgtcctttgatttttactaatcatatttttcataaatattatcaacactgattaaatatctgcctttttgacctcataatcataccatgttctagtaaatttgctttccctttcttttctttcttcgttttttttttttttcaaagacaaaatctcattctgtcgcccaggctgtagtgcagaggtacaatcatggctcactgaagcctcaaaactcctgggctcaagccattctcctgcctcagcctcctgagtagctgggattacaggcatatgagccaccatgcttggcccatttttagagactatttcacattttatctcttcctcatagtcacaaacccataactagttctctttactctcagtaagagaccttacaccctagttcataaagaaaatgtagacaccaagaagaatgattttactttttccacatcgaatttagaaacctaaatgcatccatacttatttgtttctctctctactcgtcttctatcctgttagatacaaacaatgcctctgcctctcttaaagcccactttctccacttgtactctcgattcatcatcccctcttcccttctcaagagcttctttctctttcccaaatcattttcactagtgtaaaaacatactcaaatatagtccattaagaaaacatcattagtcctcccgtgatcttgtacaggctgccttcatttgtcttttagctagcccaagaaaacctttagagagattcatgtattgcctctacttcttcatattctattcactcaattcattctagcctgacttttgtcctgtcacttccctgaaacccctgttttaaaggttacgaatggtttttgtctcttcaaatccagtggacacgtttctactctttgacacagactttcagaagcattcatcacggttgattgttccttactttttggaacacttccttctcttggcacgacatcacactctcttgtgcccccaggtcagtcctagggcctttctttttctctatattattttcttccttttgtgaagtcatctagcctggtgacttcaaataccattttattttgaagtctctaaaacttgcacctttatccttgacctctttagtgaattctccactcatatatccagtggcacaattgatgtcttcactaatgctatgcttactagacatactaaatataaaatattaaaattggacctcttcaatactttcttcattaggctttattctatctcagtaaattgtctacattccacagttcagtagttcaagccaaatatctaggatcattcttaatttctacttttctctatgtctctctgaatctaagcattcaccaactagaacctcagaactatccacttctctgtatctccgtggatattatgaaagccacattatttcaacataatcagactccttgctttcacccttaacccacttatcctattccctatagtcacaagcatcttttgaaaatgtacatcagattattttatcaccctcctttaaacctttctgcggcctcccattacaccaacaataaaacccaatctcccacagggttcagagctcccagagatctggctattgcctgcttctctcattttctttcatactattcctgtcctctcatgaatctacaaccacaaaagccttcttttttccccttgaacataccatgctcattcccacctcagtctttgcacctgcagttacttctacatacctggctgcttttactcacttccacattttatttaatgtgaggtgccatctcatctctcagttttcaactcagggagctttttactgaccatgtgtctgacatgcatttatgtattctggtgattctctgtcatgctctcctcctctattactaccttcctaaaaataatattataaataggtctaacaattggaactggaaatggtccaattaaagtatctttttttaactcattatgacattttcctccctaaaatgtaagcttcaggagggcagggactttttctgtcttgttcatcacttctgagttagaacagctgttggcatatagtggagctcaagaaatattggttagaagttgaatacacgaaaatgctaagtcaatgtctcaagctcctttttgtgtgccatttaattcctcttatattagatgctcaatttgcttattaatcaattaggtgacattgaatctcccaccagactgtgtaacataaactgtaggatgggggaagacaaagttcaaatactgtgtagcatctgggtttcactatctcttcattcaataatgttttaaaatatgagccataaaaattgagcactagaaatggcataaattaagtgaaatattgatatagaaaaatgttgcttttatttaaaaatatatttcattgggtatttatttctaataacattgcatgatgtttcacgatataaaatatccatcattctggttttttttcttaggaaaaaaaatctgttccctcctgcttgattaaaaacggagtacagcaaaatactgaagggcttcctaattatcaaataaatattaaattatgtccagtgtccttttactgttaatgtcttttagcctgactcttttaaaaattgctttctcttttaataaaaagtaaaattattttttggtcatctttatttctcagaaatagaatgctaccacatattttcacaaaccatcctctggctttagataaggatatttagaatccttagaccatttcacatttttaaaataaatataaagtcatttttcctgaaatttaattgatttaaaaaattgctttgaaaatttcttcaaaacatgacaactttagttttgcatgtagtaattgtcaagactgttaaatcatagaaacaagaatgtaaaaatagaatttccttaagccaaagtgtggtatttattagtttaaatatgcagatatgttagtgaggcacccagccttaaaagtggctgcaaaggggatctctctccatcctgtgtgtttgtctactttctcctgtctctgttttattttttcccagtgtagtaagctttgggattggaaagtggttaaatgaggaatcagtgatcaacagcagctctgaataaacttcattccagtttagtgaccaaggagaaaaaaaaaaaagttttaactttcccagttccactgagggattttgatagaagcagagtacctaattcctatgatcagtgcaggtggggatactttctcatctttctgggcaagaagatagagtctgctttcaatggatagggaaaggagaacagggtagtgcttggctgctcagagcatacaatggaaaccactgcttaccataatgtatctctcccatctgtggtcacccctccccagtcagaggctgccccaccagcattcagtggcatgattctcgcaatgtcctgaacaactctctgtatgatatttatttcccttcatcaagtccaattgtagtgcctcatgcttctcagcaacctacagggtgaacaattaaccaacctggcacagtcaatataaatttgaagcaaaaatagctctgttaaaattaaaattgccatgtaaaagagagaaacagtgttagtccctacttgagaggatatatcttatcctactgtcaaggctgctaaaccttgcttccctgctgtggatttctgtggtcaacccatctgcctggctagattcagcccacgagaaaggtttttcttgtcctctgtggaaccctgagaggggagctggagagggaggtgcacatgctgtgactgtgctgattgagcagccacttcatagttgcatgagaatgtgaattgggggattattttgttatgttaggaggtgggggttttgtggttgttgttgttattgttttattttgtttttttttttttaagaaaaaaattttctaaaaatctatgcatattgcttatcagtttcgccacagggtaactagtatctaatagctaattttttcttcttcttcagtctgtatctctgtatctgtctctgcccttgaagttctagcaataagcctcagggctctgcccattccccagttgatttttcctttcaaataaggtccttaatctctctctctcttttttttttttttttttttttttttttttttttttttgcaaggaatgcctacaccaagaggtattaggtctagtcctggaagatctggtgccctctttgatagttctccctgatcttttttctaactggagaatagggcatagcatccctgagctcttagatcacttggaaagggcggaaagcatctctaactgaagctgtgtaattacatggtgccccttttatacttgcaaatgaagcttggagtatgacttctcacttttttagcccctagggaaaaggccatggaacaagcattcttacatttttctccccaattctgaaaagctgtagtttcactagacgaaaaaaattgaatcctaaactcaatgaacaataatttggcatgcttaattttccttctctatccatcatctacttttactttcttctctttgttcctctctctaaggaatctattcaaaattgctgtttcttctggcttccatatttcggaacgttgttcaacctttttgtgactaatggtctgcgaatttctcagtggctttgattcagagtctcagatcttttgcttccttctttttaattgcttctctagttgactagtcctgtgtattttaatatctgattattttttcatcaccaagacagataccttcatcagccctaatcactcttcactcttactcatataatcgccagcagttttcaattgtttatttttcacttctctaacttatggtatccatttctacttaatcttcttaaaagggttagctgataatgcaaccccttgctcctaaacctctggtgacctcattcatttattctttcagtctttgatacgtgccaaataccatgctagttactgtagatagatgatgactaatgcagagcagctccagctttcatggtgtttatagtctatccagaaagaaaaagaaaaaaaaaactttaaagacatgcttctttccctggtttttagaactctctccaatatggtcacaactttctattctcctgatgaaaacgtttatctgacttttacagcatatctttttttttttttttctcaaagtaaataaaaaagctctatgtagtgagagcacagtggcttttagaggactcttaccactagactctgcaactttaagcttggcacaaactctttgtgtctcaatctcttagtctttatttttttattttatggagatagaatctcgctctgttgcccaggccggagtgcagtaatgcaatcatacctccctgtaaccttgaacacctggattcaagtgatcctcccatctcagcttcctgagtggctgggactacaggggcagggcaccacacccagctaatttttctatttttttgtggaggcaaggtattgctctgtttcccaggttggtcatgaatttctgggctcaagcgatcttcctgctttggcctcccaaagtgctgggattacaggcgtgagctactgcacccagcctcaatctcatagtctttaaatgataatggtaggaaataattacttacgtgtatcaagtatgtgctttgggctagcaaaacctagtcgttaaaagcacagactcttgctcagtcacactgcctggctctgggtcctggcgctgttccttatcagctatatgactgtcaggtgtcattgccttggcgtcttcatctataaagtggggagaataacattgggaatgattaaataagttaataaagtaaaaaccattgaaacagtgccaagcacactgtaagagctatgtaagtcttagcaatttcttttattacttttcttttctttttttctttttttctttttttttttttgagacagagtctcgctctgttgcccaggctggagtgcagtggtgcaatcttggctcactgcaacttccacctcctggttcaagcaattctcctgtctctgcctcccgagtagctggaattacaggcacacgccaccacacctggctaatttttgtatttttagtagagatggggttttacaatgttggccaggttggtctcgaactcctgacctcaagtgatccacccgcctctgcctcccaaagtattgggattacaagcgtgagccaccacgcctggccaatttctgttattacttttcttaataagtggcacgattattcatattttaccaatcaggaaactaaatactttgctcagggccacaagtaagtgacagagtcagggttctaacctggacatcctagtttcagaggaggcattggtaattactactctatacagtctccattatgggatttctgtaataatgtagttaaataatcaatacataataaaatttaaaactataatgcactatgaatatttaagatattattatgtgtactatagtgagttatgtttgaaagagacactattttttttcttttccatcacttaaaaccttttcactgtaccagtaattacaaacagcattttaatggcattgtataattagacaatcccttcacgtacatgcatgtatttacattgctactttcagaggatggcaaagccagtaaaatcctctctattttgaaaaagagaatgctgaggatcagaaaagttaagtaacttgcccaagtgttcacagatagtaaatgagaaaatctcctaatgtaattccaaagccccaaatgtcatccagtgttttgctatcttaccctgctattttctaatgatttattttttcacagtttgaaaactaattttataatatagtttaccattataaatttatgtaaatattaatatatctttgtgtacaactggataactacttgaacttatattcttttgtttttctttttaaagattgtgattgctagcattatgtgcagttacaataaaaatgactggacggaacttgccaagaagtctgaggtaatggttactttagtatatatttattttatttcttctctcctatttttattagttttaaataaagagctgccatgagaaataatacagtagaagtaaaactgaattgaaaatgtaacttaaaacatttctattataatttgtttaccctgtgttttcattaaaatgatggaaatgtaaatttaaaaggaatttattctataaaagcggtcccttggatttcacacactacctaaaaatcctttattctctgaatccatacactctttatttgcatgttaagcaaactgtatattatgatggatgccatgataaaatttaattctacctttgagagtctaacttgatcttaccttgcctttaggcaaactagtttgacagtaagagaagaaattttgaatataaaactcttgaatatttaaagtataaaaggttcatttaatactattctagtttgaatacagacatgcataaaagagcgggacagaatgctcctgaatggaacactagtcagcaggttttccataatataaattgaatcctgcacaaatgcaaacaagtaaccatgtgccttaaatttgtatttcaaatagaaaaatacatacttaaaattatacacttatgtccatcatgctgtcatggaaaatagtctggagagtcttagctggggttccttgaaaacctctcagtaatgtagaagactaaatctaactataccaatgaactaattgacgctacattataaaatattgcaaagctgtctgtagtgttcaaaaatgttgattatacattttatttggatattttaaaactgagaagggaaaaattactactgggacttagaggggtgaaattaaacatgatcagtaattggcctcgtgatcttccatgctgggttcatttgatacatgtatttacctaattgaccatgaaatcttccacagagcccatgcttggcatgagctttgccaattttaagctgactatgatgaatggctttatcatgccgcttgcttctctgcctttctgtaagaacaaaatacttttcaaaattatttttttcaatattagacattaatttttaaatagacaacattactttttataagtcaaaagcctttaattataagcaaactagctaacctaaagatatttttcacatttcatatttttctttaatttcagttttatttaatatcaccttctaattactctgtagcaaaaacataaataaaaagaaaggaagaaagaaaaaaaagaaagaagggaggaaaaggtatgccttttgttcaatcaaaacagtctgcaaaatctctccataggagagcagtctacataacaagaggttatgataatgtcaattaaaaaataaaaatattcactataatcttaagtctggactagcccaggagatatcatatgaaggaagtatcccgcaggccttcacagcttctaggagggtagcattaagcagcatgatttcatcacagctcatatggtaggcacccaataacgttttgtagaatcagtatttggttttggttttatgaatatgcttcaaaaccggttaaaacagatttccttacaatggaaaaacccacgttaaaacaaaccaacaaaaacatattcaagtcaaaattactgtactacctaacatatacatttcttttggggtggtgatatagggatgtaagaaatcagagacaccacaccaacactctagcatgccaactgtttcaagtttagctaatgctgtgatgtgatgatgatgtatactaaaccttaagtttataaaactgtctttatggcagattaattcttgaattacacaatggagagctgaggaaacctgctatcagctttttactacttcatctgaaacagaaatgacacatatggagcagtagagccttagaatgcacatgcatttcatgttctatattcttcaacctggtttgaatttgtcatgtttttgagcaccacaaagaagtttctactgcttgtgtcaaattagtagcattgttagaatctagttagttttcttgatccaggtacctgatcacaggctctcttgcttttctggaaccttggtagtctactccaattctatgcaaaagaagatttatgaaacacctactatgtataaagtccctggctagccaaaacaaagatgagtaatagggagcaatcagatatatgccaaactgagccatttctgaaggttcacaatattcacttgtaaatggatctttaatccagtgtagtcgatcttgaatcaatttcttttgtaatttgtaatcagccttgaaaatagagcccgagtaaaagttaatgtgaaaaagctttattgaagtatacaatctcagagcagaaagactgaggagaaaagaaaaatgagatgggaagaagggaaaacaagtgcaatatggtgcattccagagctggccacaacttcacaaggaaatggagccaattgctcagtcatatgggacagggaatagcacatcatttcacaagatgatagaatcacccattctctcatcactttctaggaaaggaagtggaaggaatgagtctactggctccttcagtctcctgtctctcactggccccatttcactccgtagggctctcctttcctctgaacttttgagttgcatgtcctgccccttcagggcagctgctagggaagctagatttgctagcatggggtgtgatgcttcttctaaacccagaattgtaggggaaggccagagcctcctgatggggcctgggcactggtgctcctggagctctcactttgacaggctcagtggaggttgtgacacaacccactctcatctggagggagtctgtgagagcggacagttactataggagatgtgaagatagcaaaagggactggggctcccctttaactagtggcaaaattcctgggtgacaagtagggccatcaaatttgaggaagcgtataattggctgtggtccaaaatgcatcattaccaagtttaactacaatagctccactaatcttcttgctctcaaccaatccaaattctttccatctttcctaatttcagaacccttaacttgaccattaagtgctacttggcccctgccctgcctgcctctccccattgtcactgtgggtctgttttctgcattccagatcccgctgccttcttttcctcctccaacacgttcccaactcagagcttttcctgttcccttggcctgcaatgttctctcttcctcagtcctgagcctctggctacgtagtttaaacctccctgtcctattctgtaagaccctgtcttcagaggccagttgaccagatagttaatgaagcttaagcttcagggcatttacttgcatgggccacttgcaagtccctgtacctaactctgtgtttacaatgtttgattattgttttttccttaaagagggttttccaaattatttaagcattaggctccccaaaatctggatctacctctgtctgtgtttttcctctgtagcatataataaagtggtgattaacagttgtgtcattggccactactaatagttcctctgtcctgcttgttagaaagcaagttccgtgggggtcgagacccttgcatggttcactgcttaatcctcaattccaagcacaaggctttctttaccagcagatatttgttgaatgaagtaaaaaagaagtatacagttcgagtattgccatgtgacaaacaaaaaggaagccattacagaataaatgggaagaatggtattttatttggcacccatgaacttgaagtgtttaaaatccagtgatgatgattttaagtcaggtacctgatgagagattgccaaggttctgaccacctttggtaggaagagacaaggaaggtccagcagaaaggcataggcattaaaaccaagtgaccacactattcctggcggggccaaaataaaacactaaaacactaacaagccagtttcctatcagtttctttacctgaatctggacagcaatatgtcatgaattaaatagctgtgagagttagaaatcccaaatagtttgaggtaaaaatcaaacagaggcacattacagagatatgtaggaccagttggatgttaagtctctgaacagggacagtaacaggacagaatggaatcacaggagatagacacgcagctggagatgagagatagtaactgactttacatccagtggggcccaagccaagagtgttttacctgtcccaggtctatctcagagaggtttaagatcccagagaactttaactccagttttgaatagttgagactagaggatagcattgctacttggaaagtcaacatctgaccccatgtattcatttaacagaagaagttaagagggaatccaataactgtgcctttcatgccccagtacagtacactgttctcaccctacttgagctctgatgtcctttgccagaccttatcacccacggacgtcttcccttcccacttggaccgtgatataccacaccatgccactggccatgtagacatccttctggctctgctccgcttaggctgtgacatcccacactgggccctcatggctcctcaaatgctcgtgctcacctgtcttgccctgcctgaccagtgactttagagctgtattgatcaggaaggtaagggaaagaaaggaagaggtaaggaaagaaggagaagagaggagaaatgctttgtgcatgatttcattgtatatgttgcacaagagtttgtggttttgccaccttagtttctctgggtgtttttataaagtggttcagagaattttaaaaactataccactgtcatattccaagaatttctcaggatagttttcctttccctcctgaggtatagacaatgtaggaccaggtgagttatcttaaatcattttcatatcaaggcagaggaaggacaagtcagaggtctatttggatggatagataagtatttagatagatagatgattgataggtagatagataaagtatttagatagatagtatacacctttatagtatttactacattccagaagtcatttacttttattttttatcactcctctttaaactcttatatatgttaaagctcttatttttcttttctgtttacttaaaactgtaaaaaataaactttcttttttggcacctttcatttcctgtgttagccttggaaacatttaaaaatacatctccctagaactcttctgtgcaaatatcaaatttatttatgccttacaacaacaactctgtgacttagttccactttttaaatatatttttatttttaatttttaatattttttggagttctagcttctctgacttgatgttttccttttttttttctttttttgaggaaactaaggccaaaagtagtgaaagagtgtgttcaagttcacacagctaggatggagtaaaagtgggattcaaacctatagtttggctcagagtccacaccatatatatatatatacacacacacacacacacacacaaactctctctttctactgtgtatagatggatgataaatagataatgtaggaaattagtaacagtgtatttcctatgtcactgccatcactaggatatttcattttataaccatttaggtgaggtggaataaactctgggtaagtgactaaactaaaaagcttgtgactaacaagaatcagaatgcatgcccaatttcagttaatttaacatttcatgctaattcagcaattaaggctttttgaatggttagagttgcttggaaatggaattaactgccttttaaggtggtgtgcatcctgagacaggaattttcaagcagaggccacatgaatgttcctgttctcatggtgtcaccttgaacagcattgtctgtttttgaggcttggatacacatttcaaaggccttgccaggtgtgtttggtgagtgggcatttgtatatgtgtataatgttggggaaattataataattagtcagtgaaaaaattttatattgaacaggtgattttaaaatattttaatttttacttcaagcttggaagctgtaaggatattgagctgttatgtttttcgtaacacactatgacaactccagccataaaataagtgatttgtagtaaattataatagtgggtataaatgcaggtcctggactcaaaatgcttgagttcaagaccctactatcagctataagctgtgggatgttggataaatcacttgaactctttatgtctcagttttatcaattgtaaagtagaaatgatgatatatcctacctcttagagttgctgtgaagataaagtaagataaaacatacaaaggacatagtaaagtatctggcatattgtaaatgctcaattaatgtaagctattattgtgtaatatggtagctaggtgtaagtttgaaatgaaatatgcataatgtaaatatgtataaaattattatgcaaagccttatttaatccaaaatgatgttgaattgatttgctgttaattgctgcatttcagttaaatagagaagtctacaggaaatatttgaagtaaccaggaaataataagaaacatgttataagtgtatacttgcactatacaatcttttcactaagctggtaattaccgcatgacatggttttgagacaggtcatattatccacagttgacacttgagcagctggagacaaagaagattgactgacttgtccaaatcatccccaattccttagctacaggcgtaagattagaactcagggttcagcaggctgtgctcatccatgctcactaccaaaccatcaaggaaagagcagcatggttttcagcaactctcaaataacatgaagacctttaaaatcggattaggaaagcaaaaccataaggaaaccatgttaaaaacaggctcaatgatcaaatggactttaacaaatgtgcagaagaaaaagcagactcactaatgaataaagataggcaagactatcaaccgattaatgactagctggagttcttaaatttgttgaggtcctacttaaaattcacaaagcaggaaaaaataggctaaaatcttaaacaattaggaaggaaagagaaagaagaaacaactgttgccctaaagaaaggtctggtgtacttagaaagtagtgaactattttttaagcctttgcatgtgataaacctgttaaaatactcttataaccaattcaagcttctagttggccttaccgaaaaataaaccgcggcactggaaaaattatagaagttaggtaaaagaatataaaatttgaatcagctagtttattcctccatctctaaaattactgtaataactttttttttttttttttttggaactggagtctcgctgtgtcacccaggctggagtgcagtggcatggtctcagctcactgccacctccgcctcccaggttcaagcgattctcctgcctcagcttcccaagtagctgggattacaggcacaggccgccacacccagctaatcttttgtattttggtagagatggggtttcactgtgttgcctggctggtcttgaaatcctaagctcaggcaatcctcccaccgtgctaggattacagttgtgagccactgcacccggccactataataactttttttttttttttttttttttttttttttctgagacggagtcttgctctttcccaggctggagtgcagtggtgcgatctcagcttactgcaagctgcgcctcctgggttcacgccattctcctgcctcagcctcctgagtagctgggactacaggcgcccaccaccatgcccggctaatttttgtatttttagtagagacggagtttcactgtgttagccaggatgatctcgatctcctgacctcatgatctgcctgccttggcctcccaaagtgctgggattacaggcgtgagccactgtgcccggcctataataacttttaaaagtgttttgtttattcttcatgttctttacagaagacttcccacgaattctaagattctcaaagtattccaagaatacttagaatgaattatgttgttcatttatacaagatctatttgtatatcaaggaattaatgatttaaataagaaggattcctattaagtaattaagacaaaactatcaatacttcctatttcttagacaaactgtttttaagtatgataatgttgattttctgttaaaaacattttacattttgcttattcattctagctagcctactacatttttgtttgtatgcctaatcccagcatcagttatccataattagtaagatttgtgtccataaaaatagaagctatttaggaaggaataaatgtgatgtcaaacagatctgagttacaatctctactgtgtcacctaataactaagcttgtcatttaacctccctatgcttcagttcacatgcctgtaaacttggtagcataataatacaaagattatgagaattagaggtaacaaatataaaacatatagagcagtgagtggccccttatgagcactgagtaaatatttggtgtgtgattgttgttgtggtggtggttgttatatagaccttaatttgagagagagagactatacctcacaagatagctgtgatgcagaaaacagaatagttaacacttgacaaatgtgacttgtgttatcaacggtgaaagcctattggtatataaataaagctttgccttttctttcattttcctttcttgtttaaaggattctggagcagatgccctggagttaaatttatcatgtccacatggcatgggagaaagaggaatgggcctggcctgtgggcaggtaaggaccttgacagctgccactaagtatgtcagtgtgacataacaggcccccgtatggatagttactataccttaggcaaggagatgcatggatcagatgactggctagagacttccaggtctgcattgtttaaatatttagtgtttaaaaagtggaaaatgagggaagctgaaattatagcaactgtttagttttattgaggaaaatatcacattatgtgcttgacaggaagtaatatcataacaaatagtttttaaaagcgctgaagcagaattagctgatttcaaatgcagtgttctttattcattcctgatgccgatccagtttccctggagcaatatactgtacaaaatgcattgttcgtagtgattttgtagtaaatggggcacggcacaaattgcattttacattttttagcatacgatcattattcactaactgtgtttggggagttgcaaaaagactttgatgctatttttatttttggatacaataaatggaaccttcatactaaaatactttcaaaagcctaatgaacaaaatgtgaaataatatgttaatatatagaaaacactgcatctttatgtaactagttaaatgttggatgttaaggagcactgtaaaaacttaatgctaaaaaggtgagtattttgcatcttataatttaccttttaagcccagaaggaaatggtgtgaattaaataatgtgaaatgtagtaatttctgacggattgtctagtcctggaaagtttattttatctccatgtctggcacaggatcttgtacttagtaggtccccacctttttttttttctctcaagtcatcaaattgatttgaattaaactcagaggcccttaatttgggagggcaaacatttctgcttatttaaatgaacatagattgctatctttgtattagcattcaggaagaattttaaagtactttgtaaatatttaacatgcagaatagatttgtgacttaaggagaaaccatttttatgtaacaacaagaaaggagggtctagtcaaatattcttcaaatatattctctgttccactcacaacaggttgcccagaagatcagtaactatgatatatgataacagaaccaagactcagaactatctagtatagggaaaacatgacattgaatcgtgacttttatgagtcacatgattagatagtagcatttaagtaatgtgattaaaatgagaaggattccttaaaggatacctggaatgggggctgagttagtattcttttcccatctcaagtcaagattgtccctccacttgtttcacagtctgtgaatctcagaaccgaagtattttttagctacatggatagaaacaactacggaggttttaaatctattgattgctttgttaggggagaatgcaattcaatatttctctcttaccacaaatacgacaattattttgaaaatgttgccctagtcccacctgagtttattttttggagtaggcttttgctatatgagcacatctgaatttactcagccattaagtgtcttaggtgcatcctttctggagagttatttagccacataaagttttgcacagcctttggctgaatgagaatgccaaatgctaaaactttgcaatcagagatatcattaagctttctaaaaactcttggaaaacacatgttccaaaaaccatgatatcttggctgaaaaaaatttaggaacatttccatttcacttattagttataatctctacaactgaaaccaattcttcatatcagccaagtttagaaattttcttttgaatgatattctcttgtaaattatatgattgaagaataaagctaatttaatcatttttgttccaacatattttaaatgatttctctgcctgaggacacatgaatgttccatattttaaataaagggaaggcagaatattagtgcattttaaaaaatgcttttctgtgactctgactttctgaagtgagcacaaacacacttgggcttatttgccttttcctctagttccttttaccccttctctgcctcctattcccattgcttctccctttacctctctaagttccaaagtcttgaacacttgccaattggtggggtgcagaatttatactcagtggtgggggactgaagagtcattctagtccctcttccccattgctatgtgatcttgcatttcatctgttgaaaacttactatgtgctaagcacagagctgcatgcatggtcagagcctgattaatatttgcttcacgaattagacatgctgtcggttccatggctaaaatatttatctgccagagacactttcttgttcagtacacattcctctctaaatacttgatttttttctcctttatctcaaatattttctcacaaatatttaatgagtgaaaaatgctgcctttgtacctaagtaatttgcctgtgtgtaatcaacattatatagatgtaacactgatatatatacatatatataagcttatatatacacatctatataaaataagtgattaaaaatcatgaaatttatgaagagggaaggccgtaatccatactctgcaacattatgggttccatatttatttatgaaatttatggaaacagaatctcaagctgaccttgggaaattgcattgtgtattcctgcaaaacaaagcttcatatcaaatcttaaaacacctcagcattgctaagtgtttaaaagtagtctcatgtattcattccatcagccatctgtgtcacctttatcaagccacttgctctcctgaaggataagtgtccatctctaaaatatgggatttgaactaaatgatctttaaatctcctttaagctttaattttctgttaatgttaacattaaaaatagcaggctactgttatttttaaactaactttaaagagcattgttaaaacaaaaacaaagaaataaacaagtgcatattgtgttgctctttttaaaaaaaaatttgctttaagttctgggatacatgagctgaacgtgcaggtttgttacataggtatatatgtcccatggtggtttgctgcacctatcaacccatcatctaggttttaagccctgcatgcattagatatttgtcctaatgctctcagccctctgaccccccaacccccaacaggccccggtgtgtgatgatgtttccctccctgtgtccatgtgttcttgttgttcaactcccatttatgagtgagaatgtggtgttttgttttctgttcctgtgttagtttgctgagaatgatggcttccagcttcatccatgtccctgaaaagcacataaactcgattttttatggctgcatagtattccatggtgtatattgtggaagacagtgtggtgattcctcaaggatctagaaccagaaataccatttgacccagcaatcctattactgggtatatacccaaaggattataaatcattttactataaagacacatgcacacgtatgtttattgcagcactatttacatagcgaagacttggaaccaacccaaatgcccatcaatgatacagtggataaagaaaatatgttgctgtttttaaaaacactaacatttctttagcctgcattaaggcagtattttacttagtgattcttgtttttactaatgcttaccctaactaatgctgctcgctttttggtatattttactttgatgaatgagaatctaggcagcagttgctcaaaaaggctatgattggttaagtggacatcttgtacttaaagtggctagaatagaacccttggtcttttatactggaggctgcgcttccattttagttaacggtgtcaataaccctgatgcttaagcaaaggtgaaaatatcattcggctttggttgcattcattccaaagaatcaaagttgtattacagcatgaaaaataaaatatgactcttcttccattccctcccaacaaccctctgaagccggttgagtttttgttccatttttcacaaggcagaggccctcgagtttcccaggtcaaagatttggtcagtggcttctagacctgcactttgatttgatattagcctgaataaagggaagttgtctagaacagttcctaataagtaggtattgcaatatcaatgttaagtatcagtattgttaactgaaaattaagtgcaggattacataggctctaaagttgtctttataattctatttcatttctctaaatatatgaaactacaagcaaacctgaatccactacttaggttctgtctcctgcgactcaaggtgcttctctggtgtattagcatccaaatttaaagttgtctacatgcaatttatataattccattttctgtaacagcatattacttaatagatttaattgttttataaccaattctgtaaaattcagccaaaatgacacctttttgaggttttccccttttcctacatgctacatgttcttaccacattgagtactaaccctcttttagcctactaaaattatattacatattttacttccatcctgcagaaccttcttacccagttcaggctagtactgaatagacctcgagtaggcctttgtattgttgtggttgttgtgtttttaaaattattgccaacaataggtggcaaaaaaatcctattatttctgttaaaataatgacaagatatggccttccctggcctgcattgtcatgcaacaataacaaggtagaccttaactaggctcctctgacactgtttctggtgcatgtgaatagtagcaaacatttgactaagaatatgtgctcattctcaaacatgaatttgaccagtatatatctttctgattcaccttttaatatcaagaccaaccttccccaggagttctactgaacctctgagttcctgacattgttgtctttgggctgccttctttggccagcagtacctttaattcttagaccttccatcagctatcaaaagaaaaatagttgcccaggagctataaatggagtgagatatgtggtaagaggccttgccttccatatggcaataaagaagagcaagatgcagcatgctccacaggacttctcaatgctagtcatataaccctcttgggatgattttctttttcctgccatcagaaaacctaaagctgcttacttcttttccttgagttgatgacggggcatagtaaagcacagaattttgtgactgagaagaaccttaaagattttccaattcatctcccttatatacaggataggaattaaggaccagaaaagtgcttaatctgccttagcctaaggtaaccaagtagcaagtcccacagctttagtgcctttgttactgacccctgtctagtgttctgtctagtattcccaactgtgttattttggcgtatcaaagtttctggtcaagcaggaaaagtcaacgcattgccctggctactccctactatacctttttgcatacaattattattccttctgcttggaatttataccttctcagctggaattatccaaatggaaatcacctctctaattctatttcaaatgacattctaattcatgagctgggtgtatattatcagtcaatcaaactttccatgaggaaggaagaagaatatatgtgaaagggtttaaagatagaaacccagtgcatactcacatttgaatctgtagtgacctagagcttgaatcactgtcaaagaatttgatttctttacctaacagttccaagaggctacaaagatgttatttccctagccctcgatggattccaattgttcagtggtttgagtgccttcattgtaggtatgattgctaaagagtgaacaactatttagtatacactcatttagtaatgatttctttggatagaaagttcaaaaatgatagtataatcagagagaagactgccgtagctttacaggcaaataaggacctgaacaaagatggcagtacaaccgctatcatctgttatatcttgccacctcacagtccccttcctgcgtttaatcatattgttcaattctatgcatagaatttttaaatattagaatgttcaactcaaacagtccaaacattagttttgtcatcagggagatgtatgaagtcctgctttcatgacgatttagctaagcaagaataaaaggtttaaaagtggtaaaccttaaaattgatttttaaagattattactccaaataccacccagagcaatactttgataattctttcacgatctgttctatgttcaaacttaatttgcataaaactgtatgtttttttttttaaaaaaaagagagaggctttgtttctgtttcaacatgccagcattttttcattagacattaaccacagattattactcttacccttgccagaaagcagacgtccgtcatcaggaagagaatccaaaccaagtgtgaggaccacagtgccccagatgtgctagaatttcccctgggaaataaagtcttccttcagcagctggcttagcagaccctctatctcatatgcaatgcagtgtccagggagcaatgaccacagccctgcttggatcagacccccatagatgtctgtggaggagacaatatgaagacacttttttaaaaccaaaacagctgaaaagtcatagtattttccatatttcccagagttgaaactcaggagtttgggaatataagaaatcccaaaggttagagaaaagaatgtgggagccccagcacttgtaaaatacaacaaacttaagccacagtagcctccctggcatctcatggagaatctaaggtgaggatcactgctgagttctgttcgctttttgatactgattaggtatgtgctcctgagacatcttctgcaggttcttgattcttctcattccttgtgacttaagcctctatgagctatgtatgtggagaattatcctgaatgtgatgtttagttatgccggaatcagcatggacacatgtaggtttgggctagagagttggaactccaggtctatgatttgacttgataagtatgggatagactaggttggcctcagtgggatgatcccctgaggcatcacttttatgggtttgaaaatcattgcactatgaaataacatagttccatgaagaaacatgagaaatgactgtgtggtataagcttctgcaaaagtgactaaaatctgatgttagccatattcattggattcatcctattttattttcctcatagcattataatttttgaagttctttaaaataaattatccacttgtttatgagaaaaactatctctaatcaaaaaaaatctgctttatactatattatgttgcccaactttttatttgattttaattctcagccatttgatagacatgggtgcttacataagtagataaactacaggaaatctgtaagagacatttatgtaactgccaatattttgcctacagctggttctctatgagtttttcaattatagttattaatgttggtaatgatgtaaaaatttttgctgcttttaaaagttgtaatttttttagttgaaagcaacaccgtttaaatctaactgaattatcagttctaggtcaggaaatattgttgtttttgtgtagcccaaccattatgtggcagtaaaaaacattatatataggccaggcatggtggctcatgactgtatgccagcactttgggaggctgaggcaggaagattgcttgagctaaggagtttgagaccagcctgggcaacatggcgaaaccccgtgtctgctaaaaacacacacacaaaaattagctggatatggtggtgtgcacctgtgtttccagctacttggggtactgaggtgggaggatcacttgagcctgagagacggaggttgcggtgaactgagatcacacaactgcactccagcctggtgaatgttacaggaaaaacagctaactatggatttttttaacttacttggtttttattgttctcatttgttttattccagaaataagcaacaaaagtattttttaagttttttaaaaatcaccctcaaatatttgttcacatcacagtgagtttgagaaatatagcagaattctctatgtatttgttgactatagcataaggatgaaataaaaatgtcataaagagagacagagacagaggtgagatggaggagaggctatggtcttagttcatgatttcatgaagagttcaggtaatgtaatgtcacagaagaataatagagattgtcagggcagagtagagacaaggtgggacaccaagattgctaagaaatgaatattggcaggaaaagggagggtctagttacgtgatctgactggcctagaatattggaagaactggtggacaagactgagtcatgtattagaagccacaaatgactcgagagtaaaggagactgcatttcaggctaaaaagcaatattggaccagaaaactagtaagtactcagcggctgagagtagagccaacagagttcaagataaggcaagagagaagataaggaataagacaaattaaacgaaggtatcagaggcaccaccttcacaaagaccttaaaattaaggtacttctaccgcaaagagaaatttgtacacgcttcctgctgaggtagtcagtcttttatggtgcagtcagtttaaggtttccaactgcgataggtgagctgtcaggaaggaggcgtatggatttgcctgactagagaaggagataaggtaagtcaagaaaaataaagttattaaaattacggcattttacaacttaggagtattggctgaagactgaaggctcttttgtcatgatcattggggaagccatattctctgagaactattacaaccccccagacaaacacgaggtggtgcttattgataatcacagattttataccaacatgaagtctctcttgacattgtttatattgcagagatcttattgaaaattttgttttatacctaactttgtttttgttctctcaccaaaagcactttaagtatcagtatgcttaatgaatatatgtactctccaaaaaaaagttttgtttaaggaaaaatcaatttaaagcatgaattacaattttactgtctttgagatgtcttaaacatctttgactctttcctcatgttatttatttatttttttctaggattgattgcttgagtttttgcccctttctccctatttgttgctactgggtctattcagttttgaaagtcctcatagataggttgcaaattccattaaccttagtatgtgttcatgattcatcagaaaagaacatgcagctttcttctcttatttgtaaaatgtctaaccttctattaagtgaatggaaaactttgttgcaattttcctttgccaacattttttctttccttgaccacaccaaaactgtaaacaacatggcaggcttggcactcctgtttttcctgtaattgtgttttgggtaacatggaagaaattgatatatgaagggataacagtatcttttctcttctaatatctgtatagatatagatatagatatagatatcatggaatactactcagccataaaaagaatgaaataatgtcttttgtagcaacatggatggaactagaggtcattatcattttttatacgtataatttaagttctagggtacatgtgcacaacgtgcaggtttgttacgtaggtatacatgtgccatgttggtttgctgcacccatcatctcatcatttatattaggtatttctctaatgctgtccctccccctgctccccaccccatgacaggccctggggtgtgatgttccccatcctgtgtccaagtgttctcattgttaaattcccacctatgagtgagaacacacagtgtttggttttttgtccttgtgctagtttgctcagaatgatggtttccagctgtatccatgatcctgcaaaggacatgaactcatcctttttttatggctacataatatccatggtgtatatgtgccacattttcttaatccagcctatcattgatggacctttgggctgcttccaagtttttgctattgtgaatagtgctacaataaacatatgtgtgcatgtgtctttatagtagcatgatttataatcctttttgtatatacccagtaatgggatcactgggtcaaatgatatttctagttctagatccttgacaaatcgccacactgtcttccacaatgattgaactagtttacagtctcaccaacagtataaaggcattcctattcctccacatcctctccagcatctgttgtttcctgactttttaatgatgggcattctaactggcatgagatggtatgttattgtggttttgatttgcatttctctgatgaccagtgatgatgagcattttttcatgtgtctgtggctgcataagtgtcttcttttgagaaatgtctgttcatatcctttgcccaccttttgatggggttgtatgtttttttcttgtaaatttgtttaagttcttgtagattctggttattagccctttgtcagatgggtagattgcagaaattttctcctattctgtaggttgtccgttcactctgatggtaatttattttgctgtgcagaagctctttagtttaattagatcccatttgtcaattttgccttctgttgccattgcttttggtgttttagacatgaagtcctttcccatgcctgtgtcctgattggtattgcctaggttttcttctagggtttttatggttttaggtctaacatgtgagtctttaatccatcttgaattaatttttgtgtaaggtgtaaggaagggatccagtttcagcttcctacatatggctagccagttttcccagaaccatttattaaataaggaatcctttccccatttcttgttttcgtcaggtttgtcaaagatcagatggttgtagatgtgtgatgttatttctgaggcctctgttctgttccgttggtctatatagctcttttggtaccagtatcatgctgtcttggttactgtagccttgtaatagagtttgaagtcaggtagtgtgatgcctccagctttgttctttttgcttaggattgtcttacctatgtgggctattttttgattccatatgaactttaaagtagttttttccaattctgtgaagaaagtcattgatagcttgatggggatggcattgattctatgaattaccttgggcagtatggccattttcacgatattgattcttcctatccctgagcatggaatgttcttccatttgtttgtgtcctcttttatttcattgagcagtggtttgtagttctccttgaagaggtccttcacatcccttgtaagttgcattcctaggtattttattctctgtagcaatcgtgaatgggagttcgctcatgatttggctctctgtttgtccgttattggtgtattggaatgcttgtgatttttgcacattgattttgtatcctgagactttgctgaagttgcttatcagcttaaagagattttgggctgagactatggggttttctaaatatacaatcatgtcatctgcaaacaaggacaatttgacttcctcttttcctaattgaatgccctttatttctttctcttgcctgatggccctggccagaacttccaacactatgtgtaataggagtggtgagagagggcatccctgtcttgtgccagttttcaaagggaatgcttccagtttttgcccattcagtatgatattggctgtgggtttgtcataaatagctcttattattttgagatatgttccatcaatacctaatttattgagagtttttagcatgaaggctgttcaattttattgaaggccttttatgcatctattgagataatcatatggtttttgtcattgattctctttatgtgatggattacatttattgatttgcgtatgttgaaccaggctggcatgccagggatgaagttgacttgatcgtggtggataagctttttgatgtgctgctggattcgctttgccagtattttactgaggatttttgcatcgatattcatcagggtttttggtctaaaattctctttttttgttgtgtctctgccaggctttggtatcaggataatgctggcctcataagatgagttacggaggattccctcattttctattgattggaatagtttcagaaggaatggtatcaactcctctttgtacctctggtagaattcggctgtgaatctgtctggtcctggactttttttggttggtaggctattaattattgcctcaatttcagagcctgttattggtctattcagagattcatcttcttcctggtttagtcttgagagggtgtatgtgtccaggaatttatccatttcttctagattttctagtttacttggtagagacgtttatagtattctctgatggtggtttgtatttctgtgggatccgtggtgatatcccctttatcatttattattgtgtctatttgattcttctctctcttcttctttattagtcttgctagcgttctatcaattttgttgatcttttcaaaaagccagatcctggattcattgatttttttaaggatattttgtgtctctatctccttcagttctgctctgatcttagttatttcttgccttctgatagcttttgaatttgtttgctcttgcttctctagttcttttaattgtgatattagggtgtcagttttggatctttcctgctttctcttgtgggcatttagtgctataaatttctctctacacactgctttaaatgtgtcccagagattctggtatgttgtgtctttgttctcattggtttcaaagaacatctttatttctgccttaatttcgttatttacccagtagtcgttcaggagcatgttgttcagtttccatgtagttgtgcaattttgaatgagtttcttaatcctgagttctaatttgattgcactgtggtctgagagacagtttgttgtgatttctgttcttttccatttgctgaggagtgctttacttccaactatgtggtcaattttggaattagtgtgatgtggtgctgagaagaatgtatattctgttgatttggggtggagagttctgtagatgtctattaggtctgcttggtgcagagctgagttcaagtcctggatatccttgttaaccttctgtctcactgatctgtctaatattgacagtggacagtggggtgttaaaatctcccattattattgtgtgggagtctaagtttctttgtaggtctctaaggacttgctttatgaatctgggtgctcctgtattgggtgcatatttatttaggttagttagctcttcttgttaaattgatccctttaccatcacataatggtctcttttgatctttgttggtttaaagtctattttatcaggtactattattgcaacctctgctttttttttgctttccatttgcttggtagatcttcctccatccctttattttgagcctatgtgtgtctttgcatgtgagatggttctcctgaatacagcacactgatgggtcttgaatatccagtttgccagtccatgtcttttaattggaacatttagcccatttacatttaaggttaatattgttatgtgtgaatttgatcctgtcattatgatgttagctggttattttgcctgttacttgatgcagtttcttcctagcattgatggtctttacaatttggcatatttttgcagtggctggtactggttgttcctttccatgtttagtgcttccttcaggagctcttgtaaggcaggcctgctggtgacaaaatctctcagcatttgcttgtctgtaaaggattttatttctccttcacttatgaagcttagtttggctggatatgaaatttgggttgaaaattcttttctttaagaatgttgtatattggcccccactctcttctggcttgtagagtttctgctgagagatccactgttagtctgatagacttctctttgttggtaacccgacctttctctctgactgcccttaacattttttccttcacttcaaccttggtgaatctgacaattatgtgtcttggagttgctcttctcaaggagtatctttgtagtgttctctctatttcctgaatttgaatgttggcctgccttgctaggttggggaaattctcctggaaaatatcctgaagagtgttttccaacttggttccattctccccatcactttcaggtacaccaatcaaatgtagatttgatattttcacagagtcccatatttcttggaggctttgttcgtttattttcacttttttttcctctaaacttcttgctttatttcattaatttgatcttcaatcactgataccctttcttccacttgatcaaattggctattgaagcttgtgcatgtgtcacgtagttctcgtgtcatggttttcaactccatcaggtcatttaagtttttctccacactgtttattctaggtggccattcatctcatcttttttcaaggttttaagcttccttgcgatgggttcgaacatcctcctttagctcagagaagtttgttattaccaaccttctgaagcctacttctgtcaacttgtcaaaatcattctccatccagcttttttctgttgctgccgaggagctgtgatcctttgtaggagaagaggcactctgatttttagaattttcagcttttctcttctggtttctccccatctttgtggttttatctacctttggtctttaatgttggtgacctacagatagggttttggtgtagatgtcctttttgttgatgttgatgctattcctttctgtttgttagttttccttctaatagtcaggtccctcagctacaggtctgttgaagtttgctggagctccactccagaccctgtttgcctgggtgtcaccagcggaggctgcagaacagcaaatattgcgacctgatccttcctctggaagcttcgtcccagaggggcagctgcctatatgtggtgtctgtcggcccctactgagaggtgtctcccagttaggctacacgggcatcaggggcccacttgaggatgcagcctgtcctttctctgagctcagacaccatgctgggagaaccactgctctcttcagagctgtcagacagggatgtttaagtctgcagaagtttctgctgccttttgttcagctatgccctgcccccagaggtggagaccacagaggcagccagccttgctgagctgcggtgggctccaccgagttctagcttccccagctgctatgtttacctattcaagcctcagcaatggcagatgcccctccacctgccaggctgctgcctcataggttgatctcagactgctgcgctagccataagcaaggctccttgggcttggaatccactgagccaggcgcaggatataatctcctggtgtgccatttgctaagaccattggaaaagcacagtatttgggtgggagtgtcctggttttccaggtgccatctctcacggcatcccttggctaggaaagggaaatcccccaaccacttgtgcttcccaggtgaggtgacacccccactgcttcagctcatcctcagtgggctgcacccactgtccaaccagtcccaatgagatgaaccaggtacctcagctggaaatgcagaaatcacccatcttctgcattgatcatgctggaagctgcagatcggagctgttcctattcggccatctcagaatggaatcctagaggtcattatcttaattgaaataactcagaaacggaaacatattctcactcataagcaggagctaaataatttgtacacatggacaaagacaatggaataatagtcactggagactcagaagggtggaagggtggaaaagggttaaggtatgataaactacttaatgggtacaatatgcagtatttgggtgaaggctatacagaaaactcagatttcaccagtatgcaatatatccatgtaacaaaactgcatttgtatcccgtaagtctgttttaaaaagatagtactggaagtccttaccagaccaatcaagcaagagccttaccaaaccaatcaagcaagagaaagaaattaaatgcatgcaaataggaaaagcagaagtcaaattgttgctgtttactaacatgatcttatatgtagaaaatactaaggattccaccaaaaaaaaaaaacactgttagaactaataaattaacacagcacagttgcagcatacaaaatcaataaacaaaaatcaatgatgtttctgtacattaacaatgaactatatgaaaaagaaatcaaaaggaatccatttaaccaaggaggtgagaaacttacccatatactaaaaactgtaaaacatgatgaaagcaattgaaaaagatacaaaaacaaatatatcttgtgttcatggattagaagaattggtttgttaaaatgttcatattatctcccaaagcaatctacacaatcagtgtaatacctatgaaaatttaatatagtttttcatagacatagaaaatataattctaaaatgtgtatggaactgcaaaaaaaccctgaatagccaagtcagtccgagcaaaaagaacaaagctgtggacatcatactaactgattctgaactctaccaccaagtgatgttagttaaacagcatgatgttggcataaaaatagactaattgaccagtggagcagaatggaaaactcagcagtgaacctattcatatatagtcaattgatgttaagcaagggtgccaagtataaccattggaaaaaggacatcttttcattaaagggtgttgtgaaaaatgtatatccatgtgcagaagaatgaaattagatcattatctcacagcattaacagaaatattatcaagtggattaaagaggtaaatgtaagaccttaaactgtaaaactactagaagaaaatataggagaaaaagtgcacaatattggtctagataatgattttttaattttttaattgctggagctccactccagaccctgtttgcctgggtgtcaccagcggaggctgcagaacagcaaatattgcagaacagcaaatattgctacctgatcacaggcaacaagtgcaaaaatagacaaattggattacatcaaaataaaaagcttctgcacagcaaaggaaacaattaacagagtgaagaagcaacccatggatttgaagaaaatatttttgggccataaatctgataaggggttaatatcaaatatatataaggagactaaacaactctttggaaagaaaagaaatagtttgaataaaaaatgagcaagggagctgaatagacatttcttaaaagaaataacacaaatgaccaataggcatatgaaaaaatgctcaacatcggtgatcactaggtaaatgcaaattaaaaccacagtgagatatcactcacacctgtcagaatggctgttatcaaaaagacaacagataataagtgttggagaagatgcagagaaaagggagccctggcacgctgttggtggaaatgtaaattagtatactttttatggaaacatcataaaagttccccgaaaaaccaaaagtagaattaccatatgatccaacaatcctacttctgggtatttatgcaatagatttgaaatcagcttatcaaagaaatgtctgcatgcctatctatgttccttgcagtactattcacaataggcaacttatggaatcaacctaagtgtctatcagcagatgaatggataaagaaaatatggtatatatacacaatggactactattcagccttaaaaaagaaagaaattgtgtcacttggaacaatatgactggaactagagaacatgttacgtgaaggaaggcaggcctagagagacaaatattgcatattctcttacatgtggactctaaaacaatgaaacaatctaaaactaaagaaacagaaagtagaatggtgattaccagaagctcggggtggggagaatagggagaagatggtcaaagaatagggaggagatggtgaaaggatgtaaagtctcaattagacaggaataataagggttctttttactatgagatatattgtaaaacatggtgaatatagtaaataaccatttattgtacatttcaaaattgctaagagagtaaatttcaaatgttctcaccacaaaaagtaagtattttaggtgatggatatgttaattaacttgatttaattttaacgtatacattgtattcataaattgtaacatcacttggtaactcaaatatatacaacaataatttttcaattattaaaaaataaaatttcaaaaatgaaagattttgaatattaaacatatacctattattcctatagagatgatagatttagaatacataaagtgaaatatagtttccctttaggtagtaaataagtgtgtcttaaggtgattgcaataaaagtatagttatcatgatgtaaatatatcccaaaataataaattcataaatgatttttatggtgattagaaactgattttattcagtcagttccctttgtattctaggcaaagtgcctatttctacacatgggatcacattcattcctcaatcaactttgagggggaagatagaatattctccacatgaaaaataaagaaactgatggtagagtgacttgttccccattgattctccagggattaatgtgattaatgtgatacatggcaggtattcagtaaataatttggggatagattaatgaatgaacgaatgaatgagtggataattgaatgaattcacctttgacacaaaatgtcttttcgtgtcattggcagtgagaagatcctgagaaggattgttcttgagtatgacccaggaaagtagttctgatttttttaaattgagaacttacatttcaaattaattttcttccttctgtgaccactctccataacttgttctgattttttgctatctttccaccttctactattttaagcttcacatgtctgatttctccaacctaaatatgtttgtccttgtccagaattacatactacttatatatgcatattattaacaattttctgtgatctggaccatctttttcaaaatattttatctttggaactcaaaaatcattttgtttaagaatgagcattttttgcattttgcgttttactataggagtttggaggatgaaagatgtcaaaacagctgactgtgacttccttttacacatctgttgtcctatataagcaagggttgtatccaaggatgagaggacagaaagagaaagtgcactgtctagcctggtcttttgtggaattaagggatgcacttttcagctgtctctatgcctatgaccaaatggcgaacggttctggattacaaatgccctaatgtcccatcatgctttgttgagagcaggtacaacacctgacacctgccgtgctttttgtttagcaggctctcacccaagggctaattcatttaattctcacagcaattctatgatatatttactattattgttcccattttacagatgaaggaactcagaaagggtaagtaacatggcagggtcacacggcaagtcagtggcctcatctggacccaaatctcggccatctggctcaagagcctgtgctcctgtccctcagacatgactgcctctcaaagaagaattttaaagaagtaatccctggctttatcaatcacagaaattattgatagatatcttgatgatgcatttcagtttgaagacagtgctatttgtggaagttatgaaagttcctctatataaatactaccgaaaagtccagtttctggaaaatgattgctgaaaatgatttgtatggtctctattttttttgagacttttaagtttttctgcacccaaaattcatttctaaagagaaactgtagcatagaaaaaaaaaaaaaaaacagaatgcagttttccagttattaatgttaattgtccaagtcagattttatgtttaaaatccatcttttggtggttgtttactttgacatgacccctgccttaaaggagggtatatgtagtttcagattaagaaactgctctggacagaagtttattatttaggaaaggctttaaaagggggaaaaaaccccaccgaggtgtcttgagagttaatacaccccttcttcaaacggtgggaagcactaaatatgcagagcgccatccagcaccacaagtgctcctcctgcccttgcctgccattccgcagccctgcccctctacaaatggtagatcattaagccatccaggcagtgaggagtattttcatatagctactgccctttatagcagcctggcagcgagtgaccataataaattatgcactgctctgtgagactgtgacacaatgcactggaggaacagcgggggtgttagaaaatccattatttgaaatttttgtttctttttcttactagattccatgctgctcttttcctgtcatcttgttcctttttttcctatctattgttttgagggttttgtgtctgacagttcttttctactgctggttttgtcctttttgttaccttgtttctgccttcatgggctcccccaccccccttgcttgatcttgtgtgttctgagccttgttctcctttctgtcatgcgtcgtttgccttacttttctttctctttccgccttattgtctcatataatacagaaaaacaaattctctttttgcctgcattcttttacatggtgttatgtagttgtcattttcccttcacgaaaggtgcactttactgtatgtactattcattttggttccaagaaccccaaacacgtgtccggaggagtgccaatgctgatggcaataaaaaacaatcaaacatcatcccacaaagtagggaaggggaaaaaaaaatcaaacaaccagagtagttttttttgaaaacagtgtagacctatttcttccctgtagatcagttcacatagaatctgtaagattttttttttttttttactatttcaggttgttcaatattttcctcttttctccaagagcaagtcttttccaaagtgacaaatttttgacactatttcttgtaaatccagctgtctgctcattctttcattgtttcccactgatgagtacagcctgaaaagatagttccactaagtggaattcagttaattcactgattcatttaattcattagttattaattgagcaactattaggtagcaggcctcatgcagatgttagagacactgggaaccatcagtttaggttttgttcaatcttttatattccttagttggttatgtccatcattcccaatttttctttcctctttgtgtggacacgccacattggcacttgttgtctgacctcctccactttcacttccttgatccctttggatctagagctccttctttttatttagagttatttgagaaggacttttttctgcttgaaaatctcactgcatcattttagaaagttcaaacctccttggcagtgaataccaaagaatgtgccagattctttaaccccatttttgtgtcacactcaaaatgaaataaaaatagtaatctccacctctggtatggctacaaatttttgtaatacttgcagtagctgaattaaattgaattgagatgtatagttatgaaatataagtgagttacatcaaaatctgcaattcaattcttcttttacggtattgagttccttgttccttttaaatgtttttctccatttgcttttatttgcctgactgatttcctcttttataaacattctcttttctaatcctgtttctcctgaaacacgtttgattttgtttctctccctatcgtgtttgctaattctccattttttgccttattgtattctaagattaatgctgtttttatttttgttgtagttattattttaaataagattggggatagtagctcaaaaaagttagtgtactgtcttctaccacggacatgatttcttctatctctgtattcatgtcctttataattttaacctttccccttgacctcatatctctaaatttccagttcagtgtttctttcattccatgatttatttttttcttttcttgccactttgattctgccctttacctttttcctgtatcaggcttatttttaaaagaaacattggttcttttaatatcattttgcaaacgccgtgggaacatcttctctcattttatttttactaattgggctttcagagtaaactctccaacttgtcatatagttcattttaagcacctgcaagaataagtcagttgccctgtcagcttccagatgcagtggaatgttcatgttagatcttacatatttcaaacttctaatttttaattactctcttctcggtttggagaagagggaggaacagatataaagagctatgaagttttgaaagagagataataaactgaaaataaataagcaaatgtgataacggggacacttgcttccttagaggatgtcacagggaaattatttatagtggctgaataggagatacaaagttcagcaaacctcccacagattctttcctgaaggccacgacttcctgtagccaattgcatcaaacatagtggcttttctataagttcaccatatagagtttcattcatttcattactaaaagactcagccttggtaaggcactgctcccattttacaagtctttgacatgacacactcatttttaaaagcacacagtatcggttgctgttgaatctcatattgcatttctattgaccagattccagttataacataaacacttgggtaaatgattacattttaaagtcagtatgtaaaacaaccctgaacaactatgtcagatgtttttaaattttttctgattttgtgactcacagcattattaataattgaaactctgttctggctgtgcttaactagtgccagttttaatacaaaacctgtcatatttaaacacaactgctccaataataagctattaatatatcagttaatttatttcactgacccctgtaacctaaacttttaggtcaccttggatttgtcaaatgggatggctgcctacaaaagttcagtcttatatatggaggagtaaatataaaaatgttatgagcaacccacattccattataaattgtaagcatagaaagaatgtaagtaaatttgaatgactaaattatttttaagtatcagttgtatatagtactaagcttcagattagtactaaacttcagattagaaaactgtttaaataagacattttggacaaaagcctatggtttgagtatttaatatgttcctccttaccagctatatcccagccagtattacaataaagtttaattctttttagttaaaaagcagatttcaattttcccatggcttcctttctttttctttggtctccttctttgtcactcctacctctatctgtttcccagcctacaagaggagtggtcttcagctctgagactggtttctctcactgaattttgcttaaaaattaactttgtctttctgtttctttaattacatatttcttctctttttgcttacatagcatttctcttgtttgaatctgcagcattttttttttttttggattcttttagaatcattgccactttctgattcctcagggatctagaactagaaataccatttgacacagccatcccattactgggtatatacccaaaggattataaatcatgctgctataaagacacatgcacacgtatatttattgcagtactattcacaatagcaaagacttggaaccaacccaaatgtccaacaacgatagactggattaagaaaatgtggcacatatacaccatggaatactatgcagccataaaaattgatgagttcatgtcctttgcagggacatggatgaacctggaagccatcattctcagcaaactatcacaaggacaaaaaaccaaacaccgcattttctcactcataggtgggaattgaacaatgagaacacatggacacaggaaggggaacatcacacaccagggcctgttgtggggtgggggcaggggcgagggatagcattaggagatataccaaatgctaaatgacgagttaatgggtgcagcacaccaacatggcacatgtatacatatgtaacaaacctgcacgttgtgcacatgtaccctaaaacttaaaatataataataataaaattaataaaaagaaataactccaaaaaaaaaaaagaatcattgctactttcttcagtaagaacttgtaggattggctcacattgataatattaaatggttctcatttttgagagcttattttatgccaggaaatggttaacattttaagtagattatattatttaatcctcaaacaactctctgagctagtgtactattattcgtactttctagatcaggaaactgcaggatagaaaagttgagcaacttggctgaaattctacagccagaaattgaccacaggtttctgtactacaggactgtacacttaatcactactccgtagcttttctgtaaaatgacaccaggttatattacttgcttttcttcttgatgtcagaataagtgatttcctcactgtgtctttccttatcatgaattctgatgacagctcagagaactgaagcagaatagtgtccatattgggggaggggaagttgaagcctatggctttaacatctggatcaatattccccttcataccttctggctcccttctgtccgccaactgcatgagattgtgtcacacatgacagctcttatctctgttactagagtggccactttctaagggcaaggtctttatcacattctttttcatttccctcacattaccttgtatattaatattttccagataaaaggacagaaattgtaggccctgtggatgagccttccaggcaattctgctgttcagtactcaagctgtgccactgtttttcctcaaaattcaggaaaaaggaatagttcttccttccatgtaagccaggtgcagacaaagtggtctgttttgcaagaacttcattgttttacacaactgtgttttccttatttacggaaattggttacaagaaaggaagcaggataacttagctaagtagttaactgtttcttttgtagaatgcaacaatctcagatacttgaaaaggttttgcagaattttaaataagtgttcccaaagagcttatgtttttatttcaaattacgattcgacagcattcaatcccttgttattgctttgtcagacttttaattgaattattcagaacatgaaacaaaaggaaagaactgtagatatagcacagtaatattaacagaattaccagagtgctgagaattattaaagaggacattatgtttgttaatcgggcatttaatttttcttctgtttgttgatggaaaacatcctcttggaaaggattttctcaaaaaccttaattgtgacaatgccttcttaacatccatgaatatactgtacaagcaaaagctatttgaaatctaattagtcaaaaagattcctaatttccattttaactgtagaatggctgaccagcattccagtgagattggttttcagtacacaagagaaagctggccttccaaacaggctttagaaagtcagaaatgcaggaggaaaggttttaagctattacagactatagcaaaaaaaatgatatattgtattcttgagaatactgagaatgtttattgtggtctcactacaaaaaatgaagactgtgtgagataatgcatataagtagctcaatttagctattccacaatgtatatatacttcagaacatcatgttgtacatgataaatacctacaattttgtctgtcaattgaaaaaacaatcagtcaataaaaaaacacaatactccctcaatttatgagcccggtacaaccttgatattgaaagattagtgtaagaaaagaaattataggtcagtctcactcataagcatcaatgcaagatatgaaacaaaatgttaacatgcagaatccagcaacatattaaaagattaaaaagatgaatatggcatgacaacatggagcttatctcagtaaatccaggttggcttaaccgaaagaaaacatcatgtcatgtaagtcatcatattaacaagttaaagcagaaaaattatatgatcatctcactagatacggaaaatatgtttggtagaagtcaagattcattcataattttaaaaacatcttagaaaattgtgaataggaaggaacttccttaaagtgatcaaagatatttgcaaaatatctgctgcaaacatcaaacttaatagtgaaatgtggtaagcatgtctttaaaatcagaaataaaacaagggtgcctgctgttagcatattcattctacattgtactagatataaaatgccaatacagtaaggcttgaaaaatgaatttaaaataaagagataaaaaatgaaaatatcaggattgggaaaaatgacattattcacatatcttctgataatctataaaaaatatccaaaagaatccactgatttatatatttatatggatgtttaaaaggccccaaatcaccaaggcattcaataataataataaaataaaatattttatatagcatttatgctagacattgttctaagcacttaacatatattaacttggtcataaccactttcaacaattcttataaagctatatctcttaagataggggttttgacacacagttggataaattgagcaaactcgcagaacacagaactcgtaaagatacccagacagatatggaagcttgatttttgtctgagctatcattacaaaccagtgagaaaattttgaactattaactaaatactagtaagacaatcattatctatacataaaaatcaagtttaagtagatagacctttatgtgataggcagtacggtaaatgtttcaaaaacagtatagaaaaatgccttatggaccttataatctataaggattctttaaacaaggcagaaaatacagagatcataaaagtttgttaaaatttcttaatcaaaaaataccatgaggaaaacgaaaagacaagatataaattaggaataaacacttgttctacaaacaagagacagaagagtgatatttagaatatatgcatttcttcaaattcagaagcggaagacaactcaatataaaaactaaaaaaaggatcgagcaaccacttaagagaagatatagtaataatttaaaaactagaaacaaccaaatgcccatttatggtagaagagataaaaagacttgtaattatacagtggaatactttgtagcaataaaaatgaatgatatatggctatatggaaaacataaataaatctctgtgatataatgtcagattgacaaaggaagttgctgaagaataaggaagaatattatttcatgtatatggaagataaaaacatttaatactaaattatatgttctttggagatataaatgtatatggtaaaacttttaaaagcaaaggaatgagaaataaaaacttactttacctaatatatgtattataaatattcttttgcatttactgcattaaacaaaattttaaacctatttttacagttcttgcaacatgttgggaaagtcttgtaaaaaaaatcattaaaataatatgacccaagtgtaaatattgtttgtgtacttctattaggcaggtttcatagtgattaagagcacatatttcagaactggattgctgaattcaaatgctatgcatactatatgttatcatataaagcaagtgactttgcactcattttgtcttctgtaaaatgggttaataacagcattcatctcatggagttgtaatcaagactagaagccttcttacacacataattgcaagtgaggtacccatcacttttcttcctgctgttttctacctgtcaattaaaaagcattttctcgcatcccgacagtcaccgttatccagtctaggatatgagttatgagggaaaggtgattgagccattccacttggactccatttttgtgttttcaaaatgaaattttgcttggtgaaaggatttcaatgttttcttacttttgttttgatcacaaagtttaaaaagcatagttgtgaatgaacatttaagggtatacaaaaatgtagagcccattttgttgagtgaagaaaagcaatgacaaatagaatgggaagcatgattccatctcatctttaacactaatgtcagaatatacaccaaaaatattatggacagttttcatcttctttttgtccatatgtattttttaaaatgataatgcactcttcatgtaagcaggggaaaatgggacattaggaaaaaatatttttagccagttactaagaaaatgacaaacaattcagatttttaaaaatggatagacaatttaaagaagcaaaattaccaatggccggtaaacgtgaaaagatatccaacccagctggtcagaatggaaatacgaattaaaccaacacagatattatatttttcatcaactaatttggcaaagagtgattaccattagtgctatagagagtgtggggaagcagtcactttcatattttactagtggaaagtgaaacagtaccaccctttgggaaagcattttgcagcatctaagtaaatttcatggcatatacttttagtcccagcaggccaattctaaaaatctctcctataaaaattatagtacatgcataaacatgtttcatgtagttcaagttagcaccatttttaataacacaactggagacaaatgtccatccttaaagaacgttgagtaacttatggcatgtacacaatgggatactctgtcactataaaaaacagtgagatagatctctatgtcttaatgaaagggaaaaagtaaagcaattttcgcatatatcaatgtagtgtgtgtgtgtgtgtgtggtgacatatatagattatatataatgtaaagagaaaaaaattgaatgttaaaataacaataatacatgtattatataaagatgtacatatataaacatagggtttaaagaatgaaaagaatagacaccaacactactagtgtttagaacctctggtactgggaaaggagaactttcatttctttgtacaattgtctatatatgaacaattctcaacacctgtgtgttttattgttatcttctgagttatgaaatggtactgcatagcattaactcaagcgtgaatgttggtctgtctattcaaaaaataaaccatatttatttggaatcatactgccctacttctagaattccttagaatggttactagcaagtacttttggcgagattctctctctctctctctcttttttttatttttaagaaataatgaccaataataaattatcctcaattcatttacttaatctagggttccttttcataaaatactttaaaatagctattttccactaataagtgtaattctgcagttctatgtaaatattgaataattatgtattaatataattgcaattattagtgtaattttttaaaaaataagatgcttgtttaagaagctttaccatggaaacagcacatgaaactatttaccatttaccattggagtaaataggtagtaagtgatgatataaatataaacgagttaaaattttaaagacttacagacttttttaacttggcattgcttttgtgaagatttataatatctcactagctattttctacctatttattgtagtaaagggactttgttctttcatacctgaccacaaaagaaagccatttgtagctttagcactcatatattaagggagttgtatgctttttaaaaaaaattctcatggaagacataaacctaatcaaacctttctaccctctagctggtaacctctgcatgaactaaagagttgaaatattgtttaatcatgctacataccactttttacagttatgagaaacattattttgctgctatagaagcaacaaaacaaaatgtttttactctgtgttaaggacaagtatattttttaaattatttattttaaatagcatgatttcttatactacactttcattttctgtattttaaatattacttttagcaaaaggcatatttttaaaataatgataatacacatgcaacctagggaccagagaccctcatactgacttgtgcctcagataaacaacatgtaatttcagttggcaatctttacttgattccttcagtccaaactcaactattattaacctttgtttgtgacaattgaagagaataatggtggaatttggggcctttaatgtcacattgaaatcaatagctgtaaatggtagttgccacagttctaactgatctgtcacattcaaacaaaagaaggcctttctcagttcatagaagatagctgggacaattaaacacacacatacaagaatctcaaaagacttttataacattaaggaaatgtactgattcacagtattttttaaaaggctttgtttatttgtttgtttgtttgtttctttgagtgtttttttttcctctcctgaaattttaagtcaaatacaggagatgtaactgacttcatccagagatcaaaaagtgtgctctatcataaaaataaattgaattgttcttctcaaagtggtggtgatggtaagtggtagggggagtgatgataagctccttcatgagctggcaaggccagtaattgcaaaggccactaaataaaaacaattcaaaatccttgaagccagatccctgcatgccactgacagcacccttaccacgacttcaactcccaacacaaatgtatcttttagacttctgaacattcatcagtgctaaactttcagtgctcagttttgactttgtttttaattttcttattcttctggacatttggggaatgtaaattaaggggtttcagttcaagtttccatacatgactttgatacgcatatttgtcaactctgaacctactactagttataattggctgtacattgattaattccactaagaacataagtcgactttgcttagcactgtgaagctgtatgaagtaataagaatgtttcagtgattttctagaaagaaaaagccttagtaatttttatccttataataataacaggtttccaagttttattaaggcacaatatgaaatattcttattcactgaaataccattccaaccatcctttgaaaaattaaattagttgttcttcgaagtagaaactagaaagattcaatactacaagaatacaggagattaaaaggaagaaagtagacaagatcatgtatttaagtcgccttaagcaaaagtactattttttctcagcttacaattttatatgacaatttttcacacttaacattttccaaaattattagtttaaggactccattatttttctaaaaaattatacttctctgaaataaattcattgactcaagaagaacataatcaatttttaatacttcttttccccagtttatttcttctcactagagtatgagattctaaacttcgtcagatcagctacctggaacaaaacaactactatgctagtgaagcagttctcctgaaaacaaatctcctatttgtagcatttgttgctggtttctgtgttatgaattctctcactatagccaatttcaagctaccaacctgatgtcactcaacatggaatcgactccaggacaacactgaaacagttaggctttctctaggaaagacttgattctgcagctactgttagcatgactagaacactaacagtagaaaaggatgtgctaatcttccttaaggagaaaaacagagtgataaaatggctgaccagaaagtcagctgttcttaccaggtcttcgtgattatctgctttgacataaaggaaataaggatccttaatttggtaaggtaaaactaaaaagtttttaatgtaaatttcacctttttaatatgctaacctagagaactcaaaatgttcctctttaatggtgtggtctctgttcagtaaaagaacttagagagatgaaaattccatgggttcctatgtatatcctgtgttcaggagatctgttccttaaattatattactttaggagagagaaggattcatgagaaaaaattttacttgtcaagtcttgtgcatagaaatatcaatctaagcatatctgcagtaaattaggggctttgcaattcaacttgatgtaattgaaggtatttgtatgaattcaatatacatgtccgcatgtatatgtagtgagagacagagacagagggagagaaaaagagagaaccctgtgttaatcagctccttttgctatgaaacagaaaggaaggcaaactagcctaagcccagtaagagaaattgttgactcagagccaaaccataggaatggcagtactcctgacatgggggaagaccagagacaaggacctaatgtcatggtactcctccttcaatttctcttggtaactagcctttactgtcactttcctgcaaatataagcagttgataaaggggtgaggtaggtcatctgttggtttagatttagatttattaaattctagtcaaagaacccaatgtataaaacagctattttgggggaaattgccaaggtattcttgtggccaactgtatgtcaagtaattcacatgagtatatgagaaaaatacatgtgctatgtatgttgctacataatttcacaattatctattaaatcaagcaagttaattgtatcactcaacttatctacgtatttactgttttcaatctgactgatcagtcaaaatctaacagatacctattaaaatttcccattgttgtgtttttattttcttttattttttgagatagggtctcactctgttgctcaagctggagtgcagtggcgtgctcacagctcactgcagcctcaacttcctgggctgaagggatcctcccacctcagcctcccgaaagtagctgggaccacaggcacacatcacaacacctagctaatttattcttactttttttgtggagacagagtctccctatgttgcccaggctggtcttgaactcctgggctaaagtggccctcctaccttggcctcccaaagtgcagagccaccatgcctggccatcgttgtgtttttatatcatttcccactttttccctatatgtcttttcttgtttgatatatagtttatgcatatagctttgagaattattcctgtaatcattatatcactaattatctttattagtgcttttgacctgagttttcattgttttcttaacattaatatttccattcctgcattctttttttcttttctctattttcataattcattccattaacatatatagtggtaaatgacctatttacttattattataatattttgtgtttactgtttatttactttgttgggtgtttttccttttttaaaagtctcttaatttggaaattgcattcttctgctattcacaataatatgtgaaacaatatttctcgcttagtatatccagttcagtaatgacaatgatcacactaagacagcctacttgcccattttactcctgaatctctactccctgtacctttttagagacttttaaactcctttctaccttacttcctcttccttcttttctccacaatttttggatttttctgagtagctgaaagctctttgttacgggttttaattaaacacacacacaaacataaattttaagaacactgtcttataatttctattctgtcttagttatagaattatcatcacataaactaaaacaagttaacactgtttattcactgtattaacactgcattgtgctttgctcttcttgtaaagaagagatttgcttctggtagaaattttatgagattgggagtacttccttgagtattttcttcagataagatatcagtacatgggtggcatattttctgaattcttgattgttgaaaaccattgtgccttttttcttaacatttgattattatattgattggctggtataaagattcttgggcgacagtcattttcttttaataacatagtcgcataatctttcttttgtaagaaaactattttttgttctgagtagaagaaagaatttttttcattagcattggaggtcagacattttccctgattatgtctaggtgtgtggctttttgtaaaattaatcctgtctgagtcttagtgagcccattcagtcaaaaggcacaagcctttcttcaacagaatttttattctgttatttccatgattatgacttctatttgatagaagctgaagttttccccatctggaactacttctctttgcatgttatgtcacctagatcttcctctaaatcacttattttatcactaatttccttctttgtccctttattttggtcatccagacagttaattcaggtctcagcagtagctactctcttttttttttacctcctctctttgattttagaactgtgaaaatcattattgttagttcaagtaattattatttttattttctaattgtatctctttgagaatactcattacattgaaactaacattctcctctgtctcattcattagctcttccttaatagtagctacctgttcaagcttgacctccctcccacaagtttaagagtacatgaaataggtagcaatttttctttgacttccttgtaatgtagattttgccacacaagaacaggccaggtttgaggttttcttgagcactggtaaactggaggtttgtgggtgcaatggcaattttgtctggtgagctagtgattacaccctagcataccagaacctcttcactgggacaggtataagaccaggacctaagactctctaggtccaagggggacaaagttccttctaaaatataaaaacttgtagcattttgtcctacctattgcatcacccctaccctcccaggactgcctaccagccgcatgaggcaacctcctgaaggactgtgtgagaccttggcagacgtgctcttctttggatgatcgaagctccaccggcatatgtggctgggcagtctccagtggccaaggaatctgctatatattagcttcagacctgttgggacctctgttcttctcccttccccaagataaatgaatcctcacacttgctctcttctccaggaaactcaaggcttcagtggtactacttggcttatttaagtgttgacttaccctggcatcttcccatcttcctagaatccattttcacagttttaaatattgccaccaagtgtaaaggttttaccgtatacaattttttttattttcacctttattttgcttagattatctctaatgaatctaattttcccaatgtctcagtaaaaatagctgtggggttaaagtggcaggtgaaaataatgacaccataatgtcttgatacttcatgtataaaactctgtaacaaatagactgtataataacagacacatttagcaaacaggaatggaggaaccactacatttagaaaaggagaaggagagaatcaaggtgtaagttgtcaatggtactaagtacagagcccattctgcctgggagatttagtggcaactcacttcccatgaaataaagcaagttctttgtgtagccagactgagtgccacagcttcaggtcctcttgccggggaataacccttgcccagtattggcacagtcataaatgttaacatagttaaatggtactcaactgttaagcaatcccatgccattctgccagacttaaagtgtctctggaaatacagctttttaaaaattccactcagatctgtattgctttcatttgagacaatctcctaactggaaaccaattccaaaaaaaaaaaaaaaaaatgtgttaagtcatgagccttcaacttagccctggtagtttcttagcaaaaggcctaggaggtcagccatcagctaagatctcgtttgaaggtgttctgtcttagaacagtggaaatcagagggctgtcttaggaggcctaggtgaatgagatgtgttacactacagaggtgagccagcatgtggtggtcagggcagaaggatggagagtgggaaattagtagctttcgtttggacaggaagcataacacgaggtatttgatagagtcctgaggaattctgcttcctcccagctctgactcacctgggaatatttgtttctgctcggcattgtactttaagctcagtatcagatagaagaacttctcctttcggagacaaacttccctactcatatgcttaatctgagcctcatcaacttcttaaaaatcttactctctgttcagcttttacatttttcatttctgcctcttcatggtccattcccattctcctacatgcatgataaaaattgctttgattctgccaccctctcaatacacttgtctatttttcatcattccttcctttctggtcattcagaaaattctttgcttccactctccaaactctttctgtctgtgctttctcctactctgctcaaaacactatcagaagtgtcaccagtcacgttttcacaatcatctcccttttcatgtactgcacagaatttgaccttatttataacttctccttgaaacctctttaacattgtatttttccattcaatcccatctctgtgaccacttcagtttctaccctctgctgttccattttcaccttgttcctaagtcagaagtagaactcagctttcctagctcctgattcacatctctttccttgatatgatttgtttgtttgttttgagatggagttttgctcttgtcacccaggctggaatacagtggtgcaatctcagctcactgtaacctctgcttcctgggttcaagcaattctcctgcctcagccttctgagtagctgggactacaggtacacgccaccgtgccaggctaattttttgtatttttagtagagacagagttttgccttgttggccaggctggtcttggactcctgacctcaggtgatctgcccacctcggcctcccaaagtgctggaaccacaggcatgagccatcacacccagccttctttccttgatatgatttaaatatgttagtacatccattcattctacaaacacttattgagaacctagtaggtatcgacacctcaggtttgatgcctggtggttttactagacttagttctttaaatcatctttgcagttatgttttaaaaactgctgtaaaactttcaaaattgatttgggctcattgatactgcatttacctgttctgggtcaggctttgaatagcctaccaggtgtaattcaagaggcactccataaaggcttacttgctcaaatgtatctcttctattattgtgccatggtgtttgaattatgcactattattgagtcattctgtgaggtggagacactgtcacattgttgcttttttggagctttcttttaaaatatgaatattctttataaggaaaaactattaagctgtttataacttcatgactaaaatatgaaaccagtcacctcaaagagagacttgaagagatagagaaagacacgaaggacaaggatacgaaacactgggcaaaggaaaatgcccatgagagtcaaagggagaaggaggtctgggtagccttgaaacactgggatggagggggaggaacagaaggacaaaaaatatgaaagagtaaattgactctgttgtctttgctttcaaaaggcaggtggacttctttgaagtaaagcagcaactgtactattttcttttcccatatgttattttaaaatgcaagaaatttagagttattttgatacctatctgttgaattggctgagtggaaaaggtaatgcagagggctatggggacccaactaagttagagagagctgtggtaaatggaactctttgagttttgacatctttacaaataatgcctgatgattatgtattcagttgttttaaggaaaaatatatagtgattcccatggagaaacacagcattatcatatctaaatagattccaccttcacaccctgttttaaaaaatttctaaggaaggtgatatgagctcaaagttctcctgcaatcatttctgaatattggaatctgtgaagctcttttaaacagttacatggactgcctttttcctgagattcttcaggaattctggatcccaggcatcgtgtgtgtgtgtgtgtgtgtgtgtgtgtgtgtgtgtgtgtgtgtgtacttaactccataaatgattgtgatgcatagccagcgtgaagaacaactaagccaggaatttgatgagcttagtttgattagataaactgcagccatggaaagaagaggggaggctctgcttccctgttaggaaacatcttctaattaaatttaggaagcagcctctacaaaagctgacagcaaagttttctatgcaggctgcaaaggaaagcatgatgaaaaacacaggaaatattttctctagaagtttgtcacagtgacaggcattctgtcgttttttaaaaacctactctttgggtctgttccccactgccccaacacacacagaacctccgtggtaacacacttacacacagtgcttttcccaatatgcaccgggctctcttgttccctacagcacctttgttcattcttaggtggcggcacaaattcccctctaatgtctgcctcatcaagtctatttgttctccaaggacaaatttaaatagttctgctgagcactgatatccaaaatgacttctcttctctaaattctactgtagtttgtgacactgatcttataattataatttattgagctcctactatgtggtcagcaccagtcatacagctgctattcaacagagccaggaaagcagaggcttagttgatccaaagccaacattcttttcattgctttgcaagttgcagtccctactctataccaccttctattaatactttgattactcggactttgtctttgctcctagcctgaaagcgacttatggtcacagaccacgcaatatgcatgttacaaatcccgtaattctgctattgttttgtttgtttgttttttaatgtagacagatgagttgaacaatgaccatgcagcaggaattagcaagagcaggggttataacttcaaccataccccatgctagcacttgtacatctggagcagttgcagttcctctagcatcttaagtcttaagtttttaggcattttactgtcaaatttaaaataacttgcaagaaaactctgcatcttcaaaaaagtagagttccataataagctaagtaagccaaatttttgcaattactgaaaaattaacaagaaattattggggaaaagtaaatctactagtgctgagacttagatattcatgagggatatgtcccaagaccttctcaaatccccaagtatcattataatatataattttcctcataaaatgcagtaaagtgtaactgaaatatttaaatgatccctgtagacccctaatgagtctatagaaacagaactaaagtcgtttataatgctattaacgtaaattctgaattgagcactggctaaaacattttcaaatatcactttttcttgtttccatatagagcatatggtatgctcatttttgtctgagtcaccatcaaatttatccagaacttctcttttttggctaggacccatcaactttcaaaaactgtacttaaaaattcagctgggtgcggtggctcatgcctgtaatcccagcactttgggaggccgaggcgggtggatcacgaggtcaggagatcaagaccatcctggctaacatggtgaaaccccatctctactaaaatacaaaaaaattagccaggcgtggtggcaggcacctgtaatcccggctactcgggaggctgaggcaggagaatggcttgaacctgggaggcggagattgcagtgagctgagatcttgccattgcactccagcctgtacgacagtgtgagactccatctcaaaaaaaaaaaaaaaaaaaaatcctaagacttagcaattggggccgggcatggtggctcacacctgtaatcccagcactttgggaggccgagaagggcggatcacaaggtcaggagatcaagaccatcctggccaacatggtgaaactccatctctagaactagctcagagactacaggaatagaccgaatgtgcatcattataaagaagcagctctgactacagaccaccacttgcagagctgggcaagaagggtgtattactctggacagtagatctaggcccagaaataccaaatattaaaatacaaaaaattagccaggcatggtggtgcatgcctatagtcccagctacttgggagcctgagacagggtaatcgcttgaaaaccagggaggcggaggttgcagtgagcagatcatggcactgcactccagcctggtggcagagcaagactctgtctgaaaaaaaaaaaaaaaagaattagcagttggctttctttgggggtcttttaaataaaacttcacaaaattaaactactaagttaaaaaaagagttgagactacagtgtaggggctagctggaaaagctcttgaaagttcaactcattcttagccatgtgagtcattcacataccctcactgcatgattcaagtttcttacagaattacatattaatatgttctttacaaccattcacaaatagttgaaacagcaaatgtttagtctatgactctcagagatttagattatttaatttcagcctcttttgtgtttttcaatgtatccatcaacaataataaagaatttacttacttgactatgcattttgttcatttttccagagtttgtgatttacattactattcatactatgtcaggaatcaaaaaagtgcaatatcttttctattacatgacaaggcaccactatcgttttgttggtaactatcttgaattgtattcatgcccaagcatgaagacagagtacttggcttggagcagatgaagatgcttctaggacacaaaactcaacgaaatcatcaagccttcaaactcagaattcctagttcaataatttgcctatagtaatgctattcctagttctactttaatattactaccatccttattatattgctaaaaatacatatatgcgtgtgtgtttaataaaaattgaatgcatgtgtgagaaacttgaaataactctgttttatacatgtacatttttatttagctcttttaaattttccaaaaacaatctggcccatttaaagtagttaaattgtaaaacagaagcagaactagctcagagactacaggaatagacaggatgtgtgcctcattgtagagaagcagctcagacttcagattaccacttgcagagctggacaagaagggtgtatgactctggacagtagatctaggctcagaaataccaacggaattctcagtgttcctaggcacacaattagaagataacaatgatcaactaatagcatctcagatggaattcataggacctggatatgtaaaccttgaatacgagagaaataaagcattctttcttctaaggtaaaagtttctggataatagataaaacagtgatgagaatatcccgttaatactcccattagatctgtatttctcagaatttttcatcctgacctgaacatatatagcttccaagtggaattttaaagttattttcttaataaaatcacaagcattctttatattatcctgtatccatgtctgaacaacaacaaaaacactattctttattcttaagctgccctacacaaatggcatcatcatataatttgtagcaaaagctaaatgttataatacttcagaggagttattaataatttaatttattagctctagtcttctttagtctttctttcctccttctttgcttttctcctttgtgaagaaaatctcattacctacccataacccatatgaacatgagtgcaaacatttgcagtttcaactattggtgaatggactcgtataaaatataccaatacacaattttggcaggggggttgtttgtttgagacagggtcttgctctgtcatccaggatgtagtacagtcgcacagccatagcttactgtaacctcgaactctcctgggctcaagcgagcctcctgccgcatcctcccaagtagctaggactacagtcacacaccaccacgcctgactaactttttaatttcctctttttctgtagagaagaggtctttgttacgtaggctggctctgaactcctggcctcaagcgatcctcctgtcttgacctcctaaaacactggaattacaggcatgagccaccacacccatcctcaatatataggtttgcaaaaaatttgagtcatgaggctggtgtgagctagtgacttggctaagagttatcctaactcttagaagctttctcacacctgtatctcagtttcctcttactgtgttatatagaactggatcatgtagacaggcaatgatcatatgaaatatgtcagcattacatttgctttgcagttgcgttttatttttaaaaagttttatctaagtaatgaatatttagtcaagaattaatattcagtcaacaaagatatctactgtgtctttcatgtaccaatattatgattgtccctgtggatgatattgcatgatgaaaaaatacatgatctctaactttgagcaactcaaaatctgtgagcaaagacaaaatttaagttcatgaaattaaaataatttaaaggcaactataaaagcaaatggataatttgtgtagttatagaatatacggagttaactgtgactttcccaaaaggttatccaaggtaattcatccccagtgtaccacacccttacagccactctctaccccctcatcccttgccctgttgtatatttttaaatcacctacttgaaattatattacttatttattttgttcttatcatattttccactagaatgaaaacttcatgagaaaagtagctttgtcttattactgtcgagctctggcagatagagtagcagttgaatacatatttgtggagtgaatgaattaatgagtatcatcaaataaggattattacagactggttatataacatgcagcccactactaggcaaataagataattatggctgatgataccctactgtttaccattcacatactttagttattatgcaagtttggatattaattaaacaacagttataacaatgaaccacaacaaggagtgatataaaagagaatgaacttatcatcttttcaattttcaattttttagggctgcttttgagctcatcctgatttcttttaaagccaggaaaatcagtatttatttttattgattcactttatattgtgtcagggcaaaatacaggaaatttaatgtccaaacagttgttcactatctaattaggaattaagaaatataagtaaaatgtttcttgtatattaggattatatacatatatacataataacgaaagttgtagtcaagttaggacttgaattttttttgagatggaaatacattgcatattttggtgttctagaagtgaccagaaataacatagaaataagatatcaaaatatttccattctttgtaaattttaaccttcatcaaaagtcacaaacatggtaaaaatgacctgatagtcattcttttgtgaatctgtgttcaaacatagggtaagacatttatctagtgtgccattcatgcatggggtctcaaaattatttctttccttttttttttttttaagatggagtttcactctgtcgcccaggctggagtgcagtggcacagtctcggctcactgtaacctccacctcctgggttcaagagattctcttgcatcagcttcccgagtgcctagaattaaaggcacacaccaccatgcccagctaattttgtttttttaatttttagtagataccgggttttgccatgttggccaggctggtctcgaactcctgacctcaggtgatccgcccacctgggcctcccaaattgctgagattacaggcgtaaaccactgcgcccagcctcaaaattatttcttacccttacccattagtagccacagagtgctcatcaaacatcactttaatacaggattaaatactgaaaataaagaatgttagcagtgtacatttgtaatgctgattacatcccaaagagacatatactttattttgaatatgcttgtaatataaatggctgttcccactctaatacggataattcaaagttagtgacatcaccacaaaaatgaatttatgcagtattcaaattggtagcatttccacatcctgaaatatctttttgtaatgctcatttctattcatgaaatcttaacaaaattcagatttactattattcttcttttccttcttgtttaataggtgctttaggcttaagttcatcctaccaaattgtccaaaaatctaggaagtaatattcagaagttgtttctcactcaccttggaaaatattttctctaatcaaactttaaacaaattattagctttaattaaatgtgaaataaaacaaaagcatacaataaaaagccctttggtgtaaagagctgatacaaataagtccaacttgaatattcacaacttttctgtaataattgattgcaacataatcacagtaaaatttcagcatactttaagtacatttatttgtataaaagtaaatctataactctgaaatgattaacaaaatactacttaagtatactttgtaaaagtaaacctatattttatgtaatctgaccatttttcccttttctagtaggatatagttctgttatcttttctaactaatgtgtcttttggatacctataacactattgatacttttcaaataattttatcatagtatccagttatataacaagtagtattcatttattcatctgttaagtacatttctattaagcaaaaatctgagtaaaatctgaaggaaaagtaaatgagtaaattcactcaagggcaggagcaagtgtgtgtgatatgaatgggatggatattgtggatggaggaaacaacattaataaactctggcctgggagttaaacataagtagactaatatgactttcctaacatactatatagtgactggttttcgctgcatgccatgatttatatgtattatataggctattgtctctttcttaattatttagaaataaccatgtctataatatagtagcattactgttttatttcttaagaggcatctctatggtgtataaggtttaggcaattctattatgaataacataggctcagattatacattgtggacaaatcgaattatgcatgtgctatctgagaggagatctgtatgtgagcaagacatagaagccctgtatactctactctctctcagaggacagaggagatttgaagaccaattgtggatgggtatcgtgcatcaactgaaatacccacttatatctccttcatcagttgcccttgtgttaacatacagcatcaaagttcctgcttgtgccaggcccagagctatggattacccagttcttctaagaagttatatcttctaaatgcctattgttatgtatttgctttttgtaatatcagttttgcctatgaacacagcacgtagcatcaaaagcaaggcaatgtatgagcaccacctattagaagagatttagtgccatgttatttataacaaaacctggaaataatctcaacatccaaaaattgagaaataaataattaagtaaaatagggtgtatctatatgatttataaattattatatgaaatatatgactgttaaaatagtatttttaaagaagcttagtgacatagggaatgcaccttatataaaaatgaaggatatataactaaaaatgataagcattaaattttgagtacagtgtatttactcaataaaggagtaaaattttcttactcaaaggaaatagacctttttaattttatttctatttagttgtttcattatgagtaattttagttttttcttctttattcaagttggtatttgcttccacaataattaagaactttttttataatcaggaaaataacatttgaaaaatataatgtaggaatattgaatgaattatggtaaatagttgtttcttttctcattcaaggtaagacaagtagatatgattttaatctgtagcaggataagaaagatattcattggaatttgatgattataaatattatgagaagcagagtctactgtatctgttgctagggataatttgaaagaaaataagaaagctggaatgatttaagcaccgtaaagctaataggtgagaggacttggaaaatcattaactgtggtatatatgttagttttaatattgtctgggaacttcttcaggtcctatttaggcctgtgatctcaattatgtgtttaataagcaaagttcatttttggtgtctcagacagttgctggtttcacattgtaagaattcaggatgttgtttaaaccacaattgatttattttaaaatgtcttataatctctttatctttacatacacttattgccttgtaacataacagatgatctctttcatcatgtcattagttctaattgtgagaactgtaaaatgataattaattgctatatttgttttatacgtattttatgtaaaacacagttatagactctgatagttcagattaatttattgttagttttctttgactatatgtttgcaaatattaatttcttaaccccttgcaatctgccttccatcttattaggtgtctataactacattcccataagttgccaataactgtgagtggtatattctattacttacatttcagtcttcattctacctaatttctctgcagtattttacctcaataatttcatccacatcttttttaggggaagtggtcttctcatttatatttttcctggttgttctcctctctctctgaccattataaggattctgcaccttagtattaatgatcccaaagcttaagcccttttccttccatcttctcatccattcacaagacatcaaccaccatctactaattagagtttaatttgagagttatgccaatgactctcaaatctatgtttccaaaactcctttctgagatccagatttctattaactctcaaccagattctttcaggtagatgtcccatagagacctcaaactcaatgtatctgaaattcattcacccttccccagcccttgccaaaacctgcttctcttgtgtttcctaacttgattgaatacattactatcctccagcaattgaaatctgcaaaattttaaattttcattccccaactctgatttgtccttatcttgaaactttttaacattcatctttaaaataacatcctagtccacttgaaattattgattttcactgacattgtttcacattagccataccttctctttctgattggtctcctgcttggactcttatactctcaccccatagacatatataagagttatgtttctaaaacatggattaaacatatggccttccatgttttcttattgcctaaaggataaggcacaaaatctttcaaaaattgaccctaaactctagctgaaccatgtggacatgtctcctccctgcttccttcatatgcactagtttccttcccatttcatatgataccatgcattcctatgcttttgaaccttttcttaagtattttttagtcatacatttttccataggctctactccagccagtgattttgtgaatccctcaagattccaaactacaatcaccttcactgttgtctcctcacatctctctcatacacacacactctagaagttaataaaaagtaatcactccactgctaagttttcattcacttcataaacacttcaagtagagcagattgttttggatcatttttatgtctgtttattttaccaaacccagaatggcctaaaccatgaagactgtaaagctttcatggttagaggcaggatagttgcaagtgctcatttaaggacattggtccagattcagaaggtttcagtattcccacaaattattcactttcaaaaaaaggaaaaagcagtaagaaatctgtgagttgcatttgtgattttagcagttttatgttaagttctaggaatagtagcaatttgaaaggtatgaaataaagacttctttatagtgctggatgctgcctttgcccagatgatgtaaaaatctaattaggtgctgctgcttctaggtgttaattacataaccagcaaagttcaccatagtatgttccttgttaagtgaaaaaaagcgcaaagttttaaactatctaaatttagcagtcctttgggtactctgcatttgttgaatattgcaaaagtaaatacccatctgttttagtactaatatgattttgtatatcaagcactttaaagatttttttcccccatgaaaacttcatcaactgttttatcaacaatgtaggcttcaggcacttctgtaaagttgagttgggataaatgaaagatccttgtcgaattggtaatcatgcaggtattgagaatgaaagggagatcatattttaatttaacttcagtgcctcaagatattttcccttatggactatattactgttctctgtctacatatccatcttgtagaaatcatagccactgttaatacatttcaaataaagctttcctggatctgggtgatatttatcacttctttctgcaagggtctcctgaattatatgagggcttactcattatgacatattaaaatgctaaatgatttatagaggaatagagatgtattgtaattctaaaggccatttttatattctgctgaacctgacatagtttaagtgtcacaactgaaactataacttgattgtaagttctttgaggacaaagttgatgccttactcttgtaatttccacatagtccatgaaactaaggacctgctcggccaggccaatagctcctttctaaagaaaagtaaacagaagcagtatttggcatacacctgccgtaaaagtgtgtgtcctggctaccttgaccacaatttattggaccagatattgtatccctgagcaaaaagcaaccacttggagactaaataaaaagaggtcagcaacttgtcaggaagtgtgatgccataacccaggcaataatgtcactccacactggatagtggccaactgcctgtatcaattaacactcttaattgcaagcaacagaaactgactggctgtcagaagtgaaaggagatttattggcaggatacaagatggcttatggaatcaaagaaggcaggaacagcaggcttagaaaatgggcaaaaaacgaaaaggctcagagaatgaacaccaagagttgtccagctaatacagcctctaccagggttgatatccaccactactgccatcatgggatactgtcaggagatgctgcacaacacactaccacaaatacaatttaaccacttttctgattgtgaggttaaaactttgggctggatcttcagttgcctaggcctagatcatgtactggttttttggttgcaagacagtagaaagagtaagaccctcttttcaaagacttgcgaaatggggatagttcctgtgtcctaccaatgcttcatatgatttaaatttcctgcaaataggaagggaagtcaaatttcagacagccaaaatataaagaacgctatttgtactgagtgttgttctctgtggatttgtttttaaatatattatatatatatgtatatatatgtgtgtgtgtatatatatacgtgtatatatacacatatatgtatatatatgatatgtatatatacgtgtatatatacacatatatgtatatatgatatgtatatatacgtgtatatatacacatatatgtatatatgatatgtatatatacgtgtatatatacacatatatgtatatatatgatatgtatatatatgtgtatatatacacatatgtacatatgatatgtatatatacgtgtatatatacacatatatgtatatatgatatgtatatacgtgtacatatacacatatgtatatatacgtgtacatatacacatatgtatacatacgtgtacatatacacatgtatacatacgtgtacatatacacatgtatatatacgtgtacatatacacatatgtatatatacgtgtacatatacacatatgtatatatacgtgtacatatacacatatgtatataagtatataaatgtgtatacatatatacatatgtatgtatacacatatgtggatatatatacgtgtatatatgatatgtatatatacatatatatttacacatatatatgcctatacataaacacacacacatatatatgcatatatatataaaaaatagtaaaaaaattgaatcggaaaaccaagttcaactcaattttgaaaaaaattgaattggagaaccaaaaagctaatataggaaaaaggagaaagtgagtagaagtagaaatggaataagagatgctgagaaataagagcagatgtattcgtattgcagagtttttaatccttaaaacaatagacacccattcctaaagtaacaacaagaaaacaggagctgctctttagagctgctgtatgtcttacaaaatgatttatggtgtcccaatccccagaggcctagcccttcctttaccaaaaacatttcacttacttttttatttttccatgtatagttgtaataaactccccaaaatggggtaacctcgccatgtttcctttccttgacacctgaaagattaaaatagagaactctctttttacacagacacaccccttatgacatgtatgcttataaaccaccacatgagtgtaataaatatattcaaggatttttaggttcaagattgctaaagattttagataaaatccagtatccatgaatttcattttgaatttgtgaatactacacttacaaaaggtcatgtttaaagccttctctatcccacattatcaccaaagacttctaccaaagtcacccactttagtatttccttagtattattatttcctttagtatttagttttgagtatttacctcaaaaagggatatcagtccacagagctggcaaaaacaagcaagcaaacaaacaaacaaacaaaatggcctagatatttctttccagctcctacagcagcagtgggaagaaatttttttttcccttcctaattccttttatttatttatttattatttttttttattatactttaagttttagggtacatgtgcacattgtgcaggttagttacatatgtatacatgtgccatgctggtgcactgcacccactaacgcgtcatctagcattaggtatatctcccaatgctatccctcccccctccccccaccccaccacagtccccagagtgtgatattccccttcctgtgtccatgtgatctcattgttcaattcccacctatgagtgagaacatgcggtgtttgtttttttgttcttgcgatagtttactgagaatgatggtttccaatttcatccatgtccctacaaaggacatgaactcatcattttttatggctgcatagtattccatggtgtatatgtgccacattttcttaatccagtctatcattgttggacatttgggttggttccaagtctttgctattgtgaatagtgccacaataaacatacgtgtgcatgtgtctttatagcagcatgatttatagtcatttgggtatatacccagtaatgggatggctgggtcaaatggtatttctagttctagatccctgaggaatcgccacactgacttccacaatggttgaactagtttacagtcccaccaacagtgtaaaagtgttcctatttctccacatcctctccagcacctgttgtttcctgactttttaatgatcgccattctaactggtgtgagatggtatctcattgtggttttgatttgcatttctctgatggccagtgatgatgagcattttttcatgtgttttttggctgcataaatgtcttcttttgagaagtgtctgttcatgtccttcgcccactttttgatggggctgttttttttttcttgtaaatttgtttgagttcattgtagattctggatattagccctttgtcagatgagtaggttgcgaaaattttctcccatgttgtaggttgcctgttcactctgatggtagtttcttttgctgtgcagaagctctttagtttaattagatcccatttgtcaattttggcttttgttgccattgcttttggtgttttggacatgaagtccttgcccacgcctatgtcctgaatggtaatgcctaggttttcttctagggtttttatggttttaggtctaacgtttaaatctgtaatccatcttgaattgatttttgtataaggtgtaaggaagggatccagtttcagctttctacatatggctagtcagttttcccagcaccatttattaaatagggaatcctttccccattgcttgtttttctcaggtttgtcaaagatcagatagttgtagatatgcggcattatttctgagggctctgttctgttccattgatctatatctctgttttggtaccagtaccatgctgttttggttactgtagccttgtagtatagtttgaagtcaggtagtgtgatgcctccagctttgttcttttggcttaggattgacttggcgatgtgggctcttttttggttccatatgaactttaaagtagttttttccaattctgtgaagaaagtcattggtagcttgatggggatggcattgaatctgtaaattaccttgggcagtatggccattttcacgatattgactcttcctacccatgagcatggaatgttcttccatttgtttgtgtcctcttttatttccttgagcagtggtttgtagttctccttgaagaggtccttcacatcccttgtaagttggattcctaggtattttattctctttgaagcaattgtgaatgggagttcactcatgacttggctctctgtttgtctgttgttggtgtataagaatgcttgtgatttttgtacattgattttgtatcctgagactttgctgaagttgcttatcagcttaaggagattttgggctgagacgatggggttttctagataaacaatcatgtcgtctgcaaacagggacaatttgacttcctcttttcctagttgaataccctttatttctttctcctgcctgattgccctggccagaacttccaacactatgttgaataggagcggtgagagagggcatccctgtcttgtgccagttttcaaagggaatgcttccagtttttgcccattcagtatgatattggctgtgggtttgtcatagatagctcttattattttgaaatacatcccatcaatacctaatttattgagagtttttagcatgaagcattgttgaattttgtcaaaggccttttctgcatctattgagataatcatgtggtttttgtctttggctctgtttatatgctgtattacatttattgatttgcgtatattgaaccagccttgcatcccagggatgaagcccacttgatcatggtggataagctttttgatgtgctgctggattcggtttgccagtattttattgaggatttttgcatcaatgttcatcaaggatattggtctaaaattctcttttttggttgtgtctctgcccggctttggtatcagaatgatgctggcctcataaaatgagttagggaggattccctctttttctattgattggaatagtttcagaaggaatggtaccagttcctccttgtacctctggtagaattcggctgtgaatccatgtggtcctggactctttttggttggtaaactattgattattgccacaatttcagagcctgttattggtctattcagagattcaactgcttcctggtttagtcttgggagagtgtatgtgtcgaggaatgtatccatttcttctagattttctagtttatttgcgtagaggtgtttgtagtattctctgatggtagtttgtatttctgtgggatcggtggtgatatcccctttatcattttttattgtgtctatttgattcttctctctttttttctttattagtcttgctagcagtctatcaattttgttgatcctttcagaaaaccagctcctggattcattgattttttgaagggttttttgtgtctctatttccttcagttgtgctctgattttagttatttcttgccttctgctagcttttgaatgtgtttgctcttgcttttctagttcttttaattgtgatgttaggttgtcaattttggatctttcctgctttctcttgtgggcatttagtgctataaatttccctctacacactgctttgaatgcatcccagagattctggtatgttgtgtctttgttctcgttggtttcaaagaacatctttatttctgccttcatttcgttatgtacccagtagtcattcaggagcaggttgttcagtttccatgtagttgagcggctttgagtgagattcttaatcctgagttctagtttgattgcactgttgtctgagagatagtttgttataatttctgttcttttacatttgctgaggagtgctttacttccaactatgtggtcaattttggaataggtgtggtgtggtgctgaaaaaaatgtatattctgttgatttggggtggagagttctgtagatgtctattaggtccgcttggtgcagagctgagttcaattcctgggtatccttgttgactttctgtctcgttgatctgtctaatgttgacagtggggtgttaaagtgtctcattattaatgtgtgggagtctaagtctctttgtaggtcactcaggacttgctttatgaatctgggtgctcctgtattggttgcataaatatttaggatagttagctcctcttgttgaattgatccctttaccattatgtaatggccttctttgtcccttttgatctttgttggtttacaatctgttttatcagagactaggattgcaacccctgcctttttttcttttccatttgcttggtagatcttcctccatccttttattttgagcctatgtgtgtctctgcatgtgagatgggtttcctgaatacagcacactaatgggtcttgactctttatccaacttgccagtctgtgtcttttaattgcagaatttagtccatttatatttaaagttaatattgttatgtgtgaatttgatcctgtcattatgatgttagctggtgattttgctcgttagttgatgcagtttcttcctagtctcaatggtctttacattttggcatgattttgcagcggctggtaccagttgttcctttccatgtttagcgcttccttcaggagctcttttagggcaggcctggtggtgacaaaatctctcagcatttgcttgtctataaagtattttatttctccttcacttatgaagcttagtttggctggatatgaaattctgggttgaaaattgaaattctttaaagaactataccaacttgttatggatgagttctccttagtcggaaccattcattgccaagggattgcagtttttctctgataggttatttaaaattgcctcaatagtaattctttcttgcttggatttcataacattcccaggacagaagcgtgacttccctagactctcttcatcctaaatgtatcagcatggtgggtgctccagggcagaatggtgccccacactagcttcctccctgtgttggttaatcattcacttcaatatggaattataaaaatactgaggttttatgcttgtggttgttttctaagtctagcactgaaatacataagctaagtgaatagaccagcagatgtataaaatataaattgttatactgtttacactaatgctttgcattaagaaaacaaatgccaagctgcttgaagtctgcaaagaataaaaactccttattatacatttacatacacacttgcccttatccaaaatgaatccatacatagtagggcaagcagctgcctatatttcataacccactgaggtctttttaatgtgttctaagcaatgattaggaaacctgctggggttcattttggctcagctggtccacaattttgaacacctactggtggtatcaggaaaatgtgtacatgacctgtttctgcatatattaagatcttccaaattatgctgcataccctcattaataagcaaactatggatgacaccctttttgtatggtagataaaactagcattttaatttaaagataaataatatcccacacataaagaaagttcaagctcattttttggcccagtataaaggattcaacaaaagaataaactattctgaaatgctttaatgtagaagatttggaggtgtcctaattactgcgaaatatggccaatgtatggctctcgaagagttttttgtttgcctgtgaagataggcctatggaacctgtgtcaatcttggttttacaaaaaaaacatgataaaattaaagacaagggaaatagacctgggaatatacaccataggtaaagaaaaacattataaggcagaaaggaatggctgcccctaagtgacagacaagtcatggatcaattttgggtgcaaggtaggcaactttaggtcaattcaggcaggcatagaggctcagagggatccaatccagaaagaagtgaacaatggataaagtctagaaatgtagagtacagatagcggaaagggagaactagacttcaaacaagcagaatggattatgaaagctaaggcagacattagaatggagtacagttcagaacagagggcattggaggcccaacacacctggaagaagtttcatctgacctctcaatgaatgatattttattttattttattttattttattttattttattttattttattgagacagagtcttgctctgtctcccaggctggaatgcagtgacgcaatctcggctcactgcagcctccacctcctgggtttaaaggattctcattcctcagcctcctgagtagctgggattacaggtatgtgttaccatgcctggttttttgtttttttgtttttttttttcttttttttacttttactagagacaaggatttgccatgtgggccagggtggtcttgaacgcctgacctcaagtgatccaccctcctcagtcttccaaagtgctgggattacaggcatgagccaatgtgcccagcctctcagtgatgttttaaagggtttgtcattgattgcatctgtaagagacaaagaattggaatgagtattagcatctacactgattcctctggccatcctcccttgatggataattttgtcttgcggacacaaaggcatcatgtcctttatccatgggcatttgcacaattgcttccagagtcccacatcacaatagtgagtttgagcaagttctgaatcaaaagatcaagtaagtgtccaaactctttaaggatgtctctgagttgtctttttgcagaggtcactcaatcattgtctcctaccatgtccctaaaagcagtctttttctaggaaaaaaattagccctgcttcctggtattggaccttttctttcccctgagcatatattggctattgctgggtaggtcaccaacaaggcttaactgtattcaggacattccaagagaccttgttctgtcaagccaagggtagaactagaattcagaagaaatttgagagattcgtttggattcagcgtagctttcttgaattcctctcagtaagatatcctggggtcacttgggcaagtttctttcttctttgactttcctagaatatagcgtaatcctcttacagggagaattcttcatacaagtagagaactgttgtgtcagttgagtcctccaggaatcagacacagagagggagttaggagggccaaaggtttattggagagaaatgcttgtgaaaggaaaaaagtggaagcaaaattggaaaaggggagccattggaccctgatacagacacaagaaaagtctttgctagcccagtagggagcttcaggacaaaaagtgcctattagaggagtcccacattcaccggaaatagctagacccttgtactacagttttgctatcattcactggggtctccctgaaaggagcatgaccccagtttaaaagcgaggcacacctaaaggaggaagcagttagaggcagtcagctcaccacactcctgcagctgggccagagtctgttcctgaaggtagatccgagtggttcatgtctgtgtctgttgcagttgcctgcttctgcatgtatttttcttagacgttttcagaacttagttactttagcatatctactcatcagttctcgtgaaaagttatgcgactcctcaacattgcagaaagttaaccctttaaattgcagagccccctctaccatgcagggtctgagccctgcttccatttctttgatgcaacatgggattcctggaatagagacaaggtatttacatattaaaatagcaacagtgctacagtgcccctgagaggctcagtgtctagaatagcacatgaaactgtgggcagaaggtgttcattgatctgtttatttgggcaggtacctctcaaacttcattaccatggccaggtgaggccgtggatttcctgttgggattagccggcagaagcaagataattctatgaaatctgaatctgattccatagggacaaattgtggcagaggagatctgaaatttgaacagctttcagggctgatctctacaattaacactgccatttgagagtaaagaagtgagctggtggagaggatctgagagtcctcacagagaattaaaatagtgcctgaaagaacgctggcagtcaggaattaactaaacagtgagtagtgtatggcaattcttgtccatttgtaaaaaaaaaaaaaaaaaaaaagaaagctttagcgactaagtggaatggggagcattgacactaagaatgtcagaggaatggtacactagggaaattttgtctgaaaggaagaaaaaaacatcattaagttatgttcaccagaaatgatatttaaaggaacaaaacaggaatatagttccccttagctgataaaaatatggacagcatctcccttcccctcaaggtcccagggactaaagactgagagttgaggcagggtcagggtcagaggtacaaactctggaaaagccctcaatatattaaaggttcagacagaaaggatcatggtcagcctgggtcctcaggtgggttctcgtggacttctaggccacagtaggagacagttctctccaagtattttagctcactgatggagagcatcaaaagactgttttcaaactcagttggctcctggagcaagagctgctaatatcctgtatctccagcttattttggctccatggaagaggagatgcaaatgttttgtggttcatgatggaaagctggtatgcaattagaaattcttcattctttcattcaacatggtatttattgtctttcatgtaccaggctctttgctaggataaaagagtaaaatacatcccctaaaagactaatagtctagtagaaagaaattgattatggaacagagaagatgactataaaacactgtgataaatgcagtaataaagaaacattataggagcactaaagaggcagtcatttactaatccatcctatgctgaagtgagatggaaggatttgtcatggagggctgcgttgaagggtgttattcaagggacaaaaaatgaagggcattccaggtagaaagagaaaaataagaaaaaacttgaaatgagaaacagaatagagaaggctatgtgcttggggaggagaggacacacaggtgggtctatgtcatcttctatttaaggcacaaggaagtagccacacacacacacacacacacacacaggcacacatgtacacattccaggtatatacagttacaacattttataatcacattatgtgtttgttgtatgcatttgtctcccctagattgtaaagtattttgctttatgtttttaaagaacagggatagcatattacatatctctaaatctgtattatccaatatagtacctaaaacagttatctattatgttatcctggacccagtatactgtactctcaattttcctccaagtacatagaaataagaaagtcagtgtcaatttgtgtggtgtaggctctatcaattcaacaatactgttgaatgcctactatgtgtcaggttctgcgctacatgctctgaaataagctgaaatgatagaacactttcaggatgtcttgtcttttgtgacacttaatatcagatgtccattttattgtgtgcctggtttgcatttccttgcagactctagtttcattcatcttagtgttcagcacggaaaatttgtagtgcctcatggtcaataaatatttgccaaaagggtagaacccacattacctacaatgccactttctttcatttttctatttatatttgagtgcctttagaattatttttagaataatagatgaaatttatctatattagaaataatttacctatattagcatgaacacacttaagtatagagtttgatgtgttttggcaaatgtctatacccgattataccacattcaaaatatggaacgtttcagaggtaatcactgctaacaggttacagcataaatgcatagtctgtttttcagacctctatataaatatatgtacatatttatattttaaaaacaggattaggctatctgtgtgttattctgtgtcttgcttttgttcacttaatatgttttggatatctttccatgtcagtttacaaagatttatttttaatggctgcatagtatttcattgtatggattatagtacttttcacaaatcttcccatattgacatttattctttttttccactactgcaaacaatgctgtagtgaatggcagacatctttgtacacatattttgaatgcatgtggatttaattaggctaggtatttggaattggaatttaaaacttataagatgagctttacatttttatacatattaccacattgttcttaaaaaggagttattaatttactttcctattgagagcctatgagaatgcctgtttctttgcaacctcagcaaagagggatattatcagtctttacattttcggcaaatcatgataggtgatcatgtttattcttttgtttttctaattactagcgagattcgatgtcttttcatatttgctggtcatttgtatattttcttattgtggaatatagacaacatacatgaaacatatatgtatgcatttataaacagatacctacacacacacatatatattttttaacaactcataatgtgcacaccatgtgaccaccaggtcaagaaatagaacatctccaacacctcaaaagctccctatatgtcccaccctaacacaaccctctctgtccactttaacaccatccctactctttgctttgcttttcttcgtagttttatcacccatatatatgtctctaaagaccatatttactttctatttaaggaatttatatgaatcaaattatattgtatacttttgagactggtttcttttgctaagccttatgagattaatccttatcattgtatatagctctagtgtgtttattccattgtatgactatattaccatttatttttcattttactcttgatggacaatttggattttttccactttggggctatttcaaacagtgctactatggatattttgaacatgtattctggagtttgcatctttaaaaggacatatacgtaagagtggaacctagatcatgtgaaactgtttcccaaagactcttgtactgatttacattctccccagggtgtattgactttcccccaaccccccaatctggtagatagataatggcatcacattgtggtttaaatgagcattgtccttatatggaaaaaatgtgaaaggtgttcataaggctgatcacatttcataaattttttggccatttggatttcatcttgaatgaaatccaatgaagtatgctatgttgaacgaagtatgttaaagttttgcccatttttctcattaattttcaggtggtcctttatatattctggatactactcctttatgaattgtgcttcagaatcttgtcccactttgtgccttgtcttttcacaatgtttttaaatatattaacattttaattttaatatcttcaaatatatcaatagttttcctttaaagaaaatggaacatttccattaccctcaaaaattttcttatacttatttccacttaattgctcctccagcctaattctcagtctcagcaaccactgctctgctttccatactcatggtttttcctcttacagaattttaataaatgtatgcatataatgtctacttctgtaacttagcatcattttgttttattaattccaagttgtggcatgattcattagtttctttttgttgttgaatcatatttcattgcgtggatatgcagcaattttgtttattcaactcacatattgatgaatattggcattatgtcaaatttgggcctattttgaaaaagtttctgtgagtattcatgtgcaagttttaatgtagaaatatgtttccatctcacttgtatatataattaagagttgaatttctgggttaattagtaagtccatgtctacctttttaggaaactgcacaactaatttccaaagtggttggaccacctttagaatacttaagtcagaaaaacagatgcaagaaggacacatgctaaaaaatagttaataaaaacatctccatttcaacacatagtctttgcattcactaatattataattgtgcctggaacagttgactgcctgtcctgttttattgacatagaaggataatacatcacgtttgctcattatgttgcagctacttctagtcttacaggaataagtgaagtagaagccttcgatagttctagtttacaattgatggctgaatttcacttcagggagcaattttgctaaagaagatgaaggtttaggacatgataatgggaaagaaaattaagaaggtgaaattggtactcagattgatcttctgggccccagttctttccatcagaaacatggatgtaatgaaaattctagccacctcttggcatgtcatatgaattaagacttaagagttgcttagtgaaaaacattttataactggtaaaattttgcagtggatttattgaaatgccagattctaagaaagccattttgaaatgaattgtacagagtgaaaattactaggtaaatgggagagaaatgtttcttcaagtcaaaatttcacttgtaatttagcttatcaggaaattctcagtctcattctgtagtgcttattcctttgcagaggacatgaaaccagtgagatttgatgccctaagtaattggtagaaatacctgctctacaatgaagaggtcatcttcagggtctcaaaagcagcaggatgggtcatttatagaactcccttaatgtgtaactaaatacagagtagttactagaattaaaaattattatcttgtgtcccagattagaaattaagctttaaaaacaaccagttttgcataatggacattactgcagcaagtaatctgcattcctcagcattaccttttctagttgtgttgtcaccgttgtttgattttcataggaatctattcccgataagattagttgcaggcagacactgggctgtacctcatcaaaattttcaaataggccaaatttgcctctagcttgcttttatcaaaactcttctcagcacttcacaagtctgctctggtaccttcactttatgtagtatcctcaagaccaccatttgctccctagatctgtcactcattctcttaggggcttcaagtgtctttctgcttataatgccatgcacctctgtcacaggaaatcattttgttgcttcagagctttctttggtgatcacattgaatagcaaaagggttaacaggtattgaagaacatgctcacacacacacacacacacacacacacacacacaagacaagcaactactgtgacagagattgcaaatcatgttcagggagaagcattaatgcctttagaaagcaccaataaagcctttgtgatctacgtagacgtttttgtgtattagacatttttaagattttgttaagctattctgtttttcttaattatccatcactttttcacagaattaccagtgatttgtaaagtagtcttcctacatttcatgcttttggacattgtcataaaatatagctgggtttttcttaaatctagacatagtttatattttgatggatatataaggaaataatgtgaaaatatgccaagttgccaagttttcactcatttctcattcattgacacaacatatattttttagtgcccagaaatagagcagtcaataattgttttttgttttccttcttcctcttcttcttctccttgtatgtattggtaatggtaaactcttgatttgtctgagagataagagtacttttgtatatttcagatcctgaagattttgggaagaattagaaattgtctaaaacttatttatttcaataagattctaaaaactggcttgttacaaaaggcaaagccatctcatgctatcactagaaaatgagaaggtcaagatgtagaaacactactaattgcttttagatcttgaacattcatatcaaaattttgaagaaaccaggaaaatataaatagttacagtctattcgtgaattccctgaagtatatagattcatttcatgatgttattgacctcaccacatttctagttgtattagaatattctctattatacctgtcaaacaaaacattgcaatttacagaacaatcattaatttttatggtaattttggttagaagttgtttttaaaattctcaggtagccaaactgtacttacccttggctgtgatgattagtcagcagctggcttgcctaagtatgaagatgagaaaaatatatgtgaacaccgtcaactttactcatggagggtcaaatttactcatggagggtcaaattatggtatctcaaaatagagacagatgattcaagtaaacagtgctaaccaaaaaaaaccatgtgtttctaagaatttgaaaaactttgaacaaattccagatcattaagcaatgggtaagaggcagtcatttaaagcagtcacctagtgaaaatcaggaaaaatgtctgacagatgttcagagtaaattattatggcatgggggtcaatagtattgaaagccacttggaagcctatatcagattattagtgtttactctattggaaccaaataatatttcaaatttgtttcagtaattcttatcaggacacattccatgtattatgccattcaagtgatctttaaattattgtcaaagtctaccttaaagagagcttccacaaaggacatgcaattcatatcatctagagttactgtcatttctaggctaagtcccatggaaattcataacttagaaatgaaagtcacaaagatgcaactgccttcataataccaatgcagtggttataaatatttcatgagcattgcatgggcaggggcagatctccattttcatgagttagaatttgtacagctaagtctccacattttactattcataatgcacactatgccctgtagagcattccatatagcacttttttaatatttatgtttaatgaagaaattactgttctaaaaagagaataagccaagccaaagacttctttttaaaagtattaagttttgcttaatagagatgataacaatcaacagaaattacctcattgcagtatcttagcacaaaaatgcataactttttgagtaatacaggatgatggatcaagacacattaaacctaagtgagaaggttctttctaaaggttataacattacaaatctcatcttaaaggaattcgaaaggttaaaatgcaaagagcaactttcttacatacaaaaacattaattacaaatgatatgcttgcctgctatttcatagtttaaatatatgactgtatttctctgggtttttcttttattcaaaaacattttaacttgctaagataatattaccaagttcgataatgaattgctattgcatactttaaggtaatttatcaaagcacattatcagtacctgtcagaataaattttgcactaaaagtaatgaaaaaaaggactattgtatgtgttgaaatcaaagaacattactgtactgtagctaagttattcaatggagaggataggtgtttgccctctaaatgatacttgccccatgagaaaataagagcctggaaaatcacagaaaataggcacatggaaatgtctatttcttgctttttaaaatgagcatttgatattttatttcatttttgtcattttgatcaattctgtcaagtttgtgagtgctgaaaatgctgcacagatcttggtaacatttacaaaagtaaattaaagttactgatcagctcatgtataatacaaggctgaattattccatatttgcatatactatatatcacatgtagattgatgatgaagtcatagattttattttgaatacacatcaagactaagtctaataatgaaaacaagctttagatttaatatcattcacttgagtcagcagttttaaatattttttattttgcttaaaccaatgagatcactagaaattttgtaatgtttcttgtacttaacatcaaaagtttgtgtttcattcctgataatatttaactgaaagtgggaaacactgtcttccattttgttctttgaaattttattttctaaaggctctgttgaggaatttaacctttatgtgatgaatttgcagttcacttgaagtgtgttaaccttagttccctaatgagtctaggtgtaatactgaggaggaatttgagaaatatatcatgtagctcattgtcaagttggatttgtcttgcacgtctccagctttgctgttgttccagtacacattttgatcacaattctttaattttgttctatatttaaccgacctatttgaacaggatccagagctggtgcggaacatctgccgctgggttaggcaagctgttcagattcctttttttgccaagctgaccccaaatgtcactgatattgtgagcatcgcaagagctgcaaaggaaggtaagaacttgacttgaatcagttgcccgctattgtaaatattggcccacattatgtagccatactcaagtatgtcttttcctacaaacatgtgcatattttttgtctcaattttaaaagtttccagttgagcacttgatcccacaaacacaggagatttacacctggactcatgctagcaaattgaccatgaattttgatctggaaacacaagatcctttatagtttttcctaataaacacttatttcacacattataagaacaaaaaacacagtcacagcaaacccgtccaaaataaatgacctcataatgtaacaattcaatatattaaactttaatgagtaaaaaagaaaaaaagaaaattcaatttgcacaatgtgaaatttcttatgagttctcttcatattttgtagggcctagctgacttccttaaacacatgctcaataaatatctgttgaatacaaaaatcatgcgtgcttgtgttccatcccagggaaattgcaccctgacttgcaaagacattgtaaattacctggaaaataacaccaaatacaaaacatttggtaacaacaagtctgtataatatttgagaaagtaaagttgtggtaattaaaacttctttaatgtttaaaattttaaacataaatgtaggagttaaattagtgaagaactttgaggagaagacatgttctcaagataaaatagaatgcatttttctgggatgtgagggtttgaatgggttttaactatcgtgtcttataagagctgcatgaaaatgttgatgtgtcttgcataggtggtgccaatggcgttacagccaccaacactgtctcaggtctgatgggattaaaatctgatggcacaccttggccagcagtggggattgcaaagcgaactacatatggaggagtgtctggtaggtgttgcccacttcttgcattgtgctttcttggaggttgctgaaaaatcagaaggtcatgttgcaagagttttgtgccctttatgatcccaaattcttataactcatagctgatcaatattcctaatagttatgacagaacggattgaatatgaaagctcaagtgacagcacaggatgagagaatatcaagataaggtcttgcacaaattctattctcttgtggtccatgctttcctaagaatttctcatcgtctctcagttcttttgccacttactagtaagggttaatatgagggccctctgagagaaaaatataagtaccctcattataatatctttttcatggtctggactagttttcattcttcctagaatttagacatctaccttcttcaaaaaccttgtcccaactgtcccaaacaagccattaaaacactgaattaagcatcagctgacaagacatttgcagacctcacacctttgcacgctctttctcatcagcatacgcttgaatttgaaaaagaaagagaggttttaatctcaaggtcctgttcagtatctttaccctgtgcactctgtgactgtgacaacatgaacttggtcttgcaaagacaatgctgtaaggttcttgactgtactggtttgggattagtctccttggtgatagagaaagtggtaaatatacataacataacagtgccccactgttcaagaaaagcattgctgaatcagaccaaaatgtgcttttggaagaggctggacagacacaaataaagctctatccatgctgaggtattcagttttgagagtatgaagtatgcctgtgagccatgaagaacaaaaacggttatattctgcttttaattgaatgccattcccacaatgtcagaaagaagaaggctgacgaggagcacctgctcaggctccagacacagctcgcttttatcaggagctatcaaacagggccttaaatattattgtaatgcagaataacgtggaccgcgttagcatgtgccacagaaagagagtcaagagactccagagttgggctgtaacatgcactatgttttctgtcagcccatttcaatttttccagcctgccatgttgacagcaagagaataaaggaggtcacagagggtgctgaacattaaaaattaataaaagaactattgcagtagtattttatataagtaacaccattcatgttttctcatttaagctgcaatgtctgaatattctcccatactataactcagtctaataaaactacaaaattacagcattagaaaaagtcttttgtgttgcagtctttaagcatacacacactggaaattatagcagtacctgaaaacaagctcagtcatacctcagggcctgttagcatttccataaaactctatttctaagatttataaattcatatataaatattcacttgggctataagcttaggtaagcctgggtagaactttcattttaaacaacaaaaaatccctaacattttaaaggacttgtacctcatttctaataggttctatattaagtttcttcacattaaacaatctgttttgaaaatagcctttctccacattgacagaattaatatagttttcctcctttaaagtaatgcttgcttaagtttaaaagtaatagaatctgaaaagcagtttaaataggcaatgataatatattttaggacagagcaagttctataacagagtaccttcagtatgagttatagcaaaacttagcctagcaaaattgtgttaaataataatggtttcaaattttacgagagttgtatcaaatatggttgtcaggacttcaaatgctgccttaatactgaaagttacacaaaataagctagatatttttataagatttttaaaaaatttaccatagcacagtgctaatatctgctcaagtgttgtctcagagcatggcaatgtctgctttcagagatgctgcatgaatcacagatttttaaaaagtgaaaactaaatagagtttaattttggatagccacctgaacacaatacatacttttcattgccagtgaaggatattttcccctttcaatatattctttagctgtttattcaattgttattatttttctcagaataagatttctgctctttgaaatgaagattatgttttgtttaaatacggaaatagtgaggcacctggagtagtatacctgctgtagaaaactgggcacatttcaggaatgttcttctagagaaaatgcattagctaataagggacagtgacttgcattgggaaaacgggatctcagctaaggaatgtcagtggaattatttccgatataagtagcctggatttgagagcaatgtctttcaaaggttggttcccaactcatgagtatactatgcaatcaagtttagtgaactgtaatcaacattttaaataatgaaatagaataagaaatgtcagaatgctttgcatatagttgggataagcattgtttggccaaacttctttttcagttatacacataatatacacttatatatgccataatgtaaaacgcactttttacttagttaacttcaaaatattttgagagttactgtttcagagggaggtctcttttgttaaataaaagaagtcaataagactatagaaagataacttctacctgctgtagcttaaaagttacatcaagagagcaaattaggacctcactccaaggtcttatcctcagctttgctattttagaagcactttttctaattcatctacagatgattaaactctggggggcggtgcttaaatatatgaaacaaactcataataaagtgatttataaacttgaatttcaattatgggagaaatacatcatagtattgctccattaaaaagttgaattatataccagatgatttcatagtgagaacagtataaaaggaaatcttgtttggtatccaaaaggaatattttttatcaaacaaggatggctgattcagctctccaccatataagtactctgtctaaaccattgattctaaataattctgtacctttctttggacagtatagatgtaacactaagttgttacgacctttcctttttctagaatccatgcagaaaacttctgttgcatcaaacagcagttaattcatgtatcatcacacagctgaatagtttattgggtttggagagaggaaaggaagaagaaattctttgacttatttgattggaaaaaaaccctaatctcagtaacaattataaactccatccttgactgcgtgacccattatttttcccagtttaatttctttttttcttgttttagtttgaaattttgacctttttttctgacttcattcccaaataatgagggcatcttaagatagcccccaaatcagtgattactatcacctatataaatggtgttatccagctgtggtgtgacattttcacatgaaatcctccctgtgggtaagattctttcagagctggttaagaatcagtcctgcatggcataagctaaagatgtctttcttgcagctgacttcatgaggataacctttattcatttacaggtgcttcgggagaaacagtattcaagcatttttcaatggggtgaattcatttgaagttttcgttgttgttccttgtgtttttaacttttttttattaatggggaatgaatttcattgtcctgtatatattttgtgtgttgcacttacaaacacatgcacattcacatatataggaaagagtgcagaaggcacttaaattgaaataatgatagacactttaggctcaatataatttacttcccacaagcttgaaaaacttattattttaaattattttatttgccaaatttgttctattttcaccaaaggaaaggaaattcttgttcttaacttcaaattttgaatgcttgtttgaagttattcattatgtatgaacttatacaattacaacaatagaacacatttttttcagtattaagacataaactttattattgatttctgaataattcataaaagatggcttttaagattttctgtttcagctcaaagttactcctctcatagaggttattacagaatccagtaaatgactgtgtatttctaaataagttataatggaatattccatgaatgttcttagagtctacaagtgaataatgaatgatttgaaatctagctgtgtgagatattggacactggcttgtatggttactagcttcctaaaggtgttttcattgtaaatccaacataggaaatactaataaaagaaggtacaagttagaaatttagctagtaatttgtagatctgcgtcagtgtagggccagaagtgagtacaaagtgtataatttagaaaacttgcacaaatgtgaatcaatatagtagcttagaaagggattttaggcatcgacttcacatcgcatagtttatgtgtttttaagatagttacttaggcgtgaattgttagaatgcaataataacttggcagcatacactgtgctactgggcattacgtaaacacaaatccagtgtaacccactctaatcatacacttattttgttgtatttattagtgaatatttgtgtaaaatcagggagatggcaaaacaaaacagattacaaactcagaagttttagttacatttttctttaaataactattttcacgcatgccagcaactgaagattttggcaggattgctttaagttcttacaccacacattacaattccatcataaaaaacagtgttagtatttttttaattgggaagttgtttttaatgtgctggatttttttatgtgtcaatcacatgattatcgatgcataaattgcttttagaaaaacatgcctattatctgtcatcaaatttaagctatctattgtaatcatcttgatcgataagagcttaggctttaacattgaagatctaaaataacctgatagataaagatagaatttaaatggataaaaatgtagtaattcatgcaaaaagaataattaaaaggagagccttccattttatactcacttttttcctttttttgtatggacaaaagtaatgcaaaaaatctggcctgttattcacctatgtaaaaacattcttagcttattacaagtttaactgatcaaactattaaagaacttgttatacaaatatgtatgtactatatttgcagaacagtcaaaagtaggcatttcaaatacagatgctagattacaattttattataaattatcactttggttgagagaggcttaccattagaaatattctcatttaaataatgctcatttgaatatattcatgtacagattgacaaagaatcccctctttcattatgttgcctttctcagagcctcagtatctcactgtttagccatcgttggtctgtgcaggagaccagggccctaataatagatttttgacagtgagctcgcctgctacctgccctacacaaatcttcactgttcatgtttgcttcatggcaacaaagcagacagaaggaaaatgccaagtgctgagtctgaggtacagccttgccttggcttgacatttcagcagaatagcagtttatgagatgcataatttttcatctgggactcagctgccatattcatagatgcttacagctcatggacagactggagcaagggcaaaggtttaaagcatagatcaaggtctacatcctttccttaggtattttaagataactattgtcctgcagataaatggtagaaccaaatagtatttaagagccaacaaattcatgggtacctggatattatatatattttcctttggttaaaaattaggaaaataaattaatgtctgttccagttcctaagaaaatatttgatagactttgtaaaccaaagaactctgacaagcatattaagaaaacttacctttgcagcagtggtaatgaattattaaatttctttcctctgtgtgtgttttttcataaagaatgatttcaagcttgaaattaatcaaaaaatgttctattatgaaagtaaaactagagagtattgtgtcactgtttgagcttgaatttaaatattcacagattcatgcatatctactgtactaaaaaatcagtgtaggtacacgtcagtggctgtttaatttagaactacacatctctgtaagcttcagaaacagttcaccatgtcacagtctcatacagaacaatggtacagtacattggattaattaaggaagccttgcagagaactgagttctcagtatgtcaagatttcagttttatgttaaatattttctaaaggccagacccttaaatctcaggggctgtaccaagcagtgagctgtgaatttaaccataggctaactgctaatgataaggaaaagagtcctagttgaggcagctgtaatacagtcattggattaggctatcaatcactcgactccctaaggaaaagggggagaagaccaaacagtgaaaagggaaattaggaaaggagagcatgactggaatgagattcctcaccatctctatccattcgtcgtcctaaatccctaagcatcagaccaaactctctagcattactctgactatacagccagcatatttattccttaaatctagaggactatcaaaatgtcattgcctctccgtagttgaagatcttgaaacctgctagaagcaaatgtctgattacataagaagaaatcagattcttaatttatgggatttaagatttatatttatgagtcttttatggatcaggattcatctatgttagtaaagaaaaatatttttatttaacttgtaaactgtagccaatttttgcatatcaacatcctcttggtgaggtgagattccagtagatcagtggttctcagactttagcatgcatcagaaactggaaggcttgttgtgacacagattgctggacctcttctccagagtttctgatacataaggcttggagggccttatgtatcagaatgtacactgctaacaagttccagatgatgcttttgctaccgatctgggaaccacactttgagaacagtagatgaagaaagattagtatcatcgagcattttagttagaatatcttatttccaaaataatgtcaaacgctttaagcaatggtaaaattagaggggtatagtatttgataaataaataagaatctctgcccacagttaagtatctgaaacaaattatagtaaatgaagtcagaattcttagaaaaagtggaacacagtctttgaggtctcagagtagggaataacattcactcttttaagattaaatgttgagtggaaaccattgtttatgcaaagagaatttattatgagtgccattgaagacaatttatggatatcactagtcctttgaaaaggaaacaggtgtgagttaggcaaggataaaattacgttctcgattgtgaaatgttatgtttttcttcttaactttgtatagacactagcatattgagaaataacagctctcttctaggacagtgcttacatgcaaatttacctagttatgttctcaaacccttaaagtgtgggaaacagcagtgctggtagcttactgctcttctctcttaatttactgctttcttgccatccccagacaatgctatccttttattagtggaagggaggagataatcaatgatttggagatatgctatttcaatgcagtgtccctgctgttagcactgttacactatgcactgagctcttccaaagtcatctttatagactgttcatgatattattcatcaatcctggaagctgcttgaaaccttctctgacagacaaatgtcctgatgtgcattcccaaaaatttagtaccatgtgaatggctggtagaaaacacctcaaattccaagaggtccttaagtgtggggcatagtaaacctttgagacacatacatggtgtctgatacttgaaggtggagactgccagggttatacaggagtgatgataagagttgttatcagaatagagaagagaaaggaatttggtcaggccagcttaactttacttgctatgcttttggagagtccaacgtttcaattcaattcagtgaaaaaatgttggattggaaagtgtactgaagatttttatatacagtacattatttctgtggttttcaaattgttatgcttacaaataccctacaattaaaacgttataaaccatatactcctcactcattttagttgacctgagaattttagcagtaagttcaagtgctagcaaaagacataatcccccatgttttgcaaatatgaattctttaaatgaaattgtttcagcattttttaaataaacctactaggaataaataacaccactgtgcttttttatatttatcatcacccatttaaaaattcataaacatgctctaacaaatagtgggaagttttgcctcttttttcctccttaaactcatattttaaaacaatttctccatcaaattttatcctatttttatgttttttttaaaatttgaacatcttaaggatcctctttggaagtactctttaacaaaatatatgtctataaatggacttttacattttaaaaattcctagattcagtctttaaatgataaatgatttcctgtattgttagaatttataatttatactttatcaaaacagcatgaatatatcataaatattgacaattattcaaaataaaagtgaattttattgaagattcatttattaatgagaaacatatggctttttaaataatttgatcatgtatctatcgagacatattattcttaaatagagtttatcatcagttttattcttttttttaggtgtagacattggaaatccttgtttatctaaataaataaactggaaggagtttattatagtcattttacctaaatatttggacaccttctccattgtaagcctaaaattagttagcgatcttcaccaaaagtgattaagcaacttgatgacttgctctttctattttattgaaatcagaaacctgggttttacctgatttgcaagaatttttgtcactcaatcattagaatcaatcattttctcaaaaccaacaccaatattttgaattattttgtttggtatccccaaatttttatattctatgtatatgttattgtaatatttgagatcaatgaaaaatatgctttttttcgaaagtaagggaaagactgttgaaacagaggagttgagacagaagaaccagcgggatgccttgattgcattgtttctcaggcatacaaaatttaagacatcatacatatggaaattgggaaactagaaaatgattcccttaaaatcagtttacttgtgggatatatagatttctgtgtaaagtgtaactctctgtgtgtatactctgtgagaaaaccactaacatatttcacttaatcttcacacaactttatgacaactaagcaataccttggttttccttttaatataaacttaactatgtctcttacagtagcactggcaattttaagaaaattatcaggctgagagcgatggctcacacatggaatcccagcacttcgggaagctgcggcgggcagattgcttgagcccaggagtttgagactagcctgagcaacatggtgaaaccctgtctctaccaaaaacacaaaacttagcctggcatggtgacatgcgcctgtagtcccagctactcctgaggctgaggtgggaggagcgattcagtctgggaggtcgatgctgcagtgagccaagattgcgcccatgcactccagcctgggcaaaagagtgagaccctataaaaaaaaaaagttatttatagatttataaatctcagtatttaagttaatatgtgctctttttggtatttggaaatttatgttgacagacttgtattgctagaaaattgatcaacatttctgcattcctcagcagcactggctattcaagcaatgcatagcagctgtgtgggaatatcgaggccttggaataatacaatctttatgtgcccagaactttattgaacactttgtatgcattcttatttaaataaccctgggaggtggataccattgggcccattctgcagacttagagactcaagtctagatacttaagaaacttgccagagtttacataaccaggatatgtcatagtctgggttcatactcagatctttctccaaaatgaacttttaggcatttttattaatatcagagattaacatctgtcatatctgtctaaatatagtatactcattaaattctaatagtctacaagtgtcacttactaatctaacatttattctctctggttttgaaaagctgccagtgtactcttctgtgacccttgttaaaattatgggccgatattacctgtttcactcagtctctatcttggaaaattgagtcagataggtaaattagggaaacattcttggattcgtttcaaggaacaaaaatgagaggcatcattcaggcatttttcttgaagtgtaagcatgcagctagaaatgtagctgccatcaatatagtaataaaaaactttatttcttactgccttggatgaaccgtctgagcactcagtctaactgtgatgccaagagcaactttggatgtccttcttaatttcttctttgtaatcctgagtaagttacaaatacctgtgttcctgcatatgtctcaccttcttttcgaacagattcatctttttccccaaagcaacatcatctcttttataatttcaactgagcttgcaaaagcctagtaagtaattcagatatgctaccttttcattagatgaggaaaaagagaaggacattttgaagacggtgaggtagggaagaaattgagatttaaaaaacctatactaagtcctttctgaagtgaaaaaggagctcacactctttctcatttctcctggtttacaacaaaacgatatataatataaataaacaaaaataaacaagaaggttaaactgtcttagcacatatctgtcatgatatggtgtgagaaatgttaattagtgtgtattaatttgaaaagaagtgtatggaacagaaaccatgagtccaaggaatgttcctaattagtctcagttcatttagcacattcggttgatgactgacctgtttggattataaacatcttaaaagcaagagccgttgtttccttcatatcgactcctccagaatttatgaaagtttcagggacatagtagacatgtaagaaaccccattttattcttaatattcagttgcatacaagcaggagcatttagtgattggactggttttttttgtttgtgacagagtgtcactcagtcacccaagctggagttcagtggtgtgatctctgctcactgcaacctccacctcccgggttcgagcgattctcatgcctcagcttcccgagtagctgggattacagactcacaccaccatgctggctaattgctaatttttgtatttttagtagagatagggttttgccatgttggccagtctggtctcaaactcctgacctcaggtgatccatctgcctcagccccacaaagtgctgagattacaggcatgagccaccacacccggcctggactgacttttaatctttgccagccatcttgattttgctgttgagctttggaaacttagtaagaaattctagctaatagaatataggccatcttactatgtgttagatgtcagatgctgggagcttttcacatgttatgctatttaatcagtacaacaaaccaatcaggtgggcacaattaggggcctgcttttttgaaatataaactgagacacagaaaggtcaagtaaattctataacatcacacagctggtatccaggtatatgggaatctctactgtctgactcttcatactgtacacttaagcactgtgcttcagctgccccttctccattgctcattctgtattaatttattccattaagcttttgtaatgtcttaacatattgtaggatgaaaatatatagtcacttttgtacttgacaaaaaaattgactgaaaacaatctataaatataacactgagattaatcactgttttaaaaaaattcacagtaatgacaggtcacaattacactgtaagtggtctagtaaacctctccatattcctattaacctctgtgcttcatgcatttctcatattaatatactgagaaataacacaaagaaacatatgtacttttcaaggcagatgccaaaggtttaatggatcaaattatttctatgttggatttttattcaatagttccaaacatttggtcttttttttagtttactccaatactaaaatgaaattatgaatttctctattaagtagttaaaatgaaaacataatagaaatgaattaggccaacaacaatgccttgtgttgttgaaatatctttttaccctagtgttcccagatccccaaacccttgttttaatagcaagcttatactagatgagggtgtggtaatattttgtagaaatagtgtgtgtgtgtgtgtgtgtgtgtgctcgcgcgtgtgcgcgcgcgtgcacgcatgtgtgtttgtgtctgggtgtttgttccttgtacattatttgaaatcactctcaaagacctttctttagtttcaccctttttatataggcttgtgatatggtttggccatgtccccacccaaatctcatcttgaactgtagttctcataatccccacatgtcatgggagggacccaatggcaggtaattgaatcatgggggcagttacctctatgctgttctcatgatagtgagtgagttctcacaatatctgatggttttataaggggcttttcccccacttcactctgcgcttctccttgctgccaacacgtgaagaaggacatgtttgcttcccgttctgacatgattgtaagtttcctgaggtctccccagccctgcagaactgtgagtgaattaaatctctttcttttatacattacccagtctcgggtatgcctttaatagcagcatgagaacagaccaatgtagcttataatacagcagaggtcactgaagtctttagtatgataatagtcacctgaggagcttttcaaatacacagattcttggaattagagcatctaattcagtagatgtttgttaaggccaagcatatatattttcaattagcatctcagaggattctgatacatgcaactttagtccccactttgaaaggaaaaaaaataaaacctaatgtggggtataacgcattataattttgtgtaaaaaaaatttaaaatgtttgttttaaggagaatgaaatgaaaaatatatatctttggtaggttaaatttagtcagtgatcattctagtactagtaattcaaatataggaatttagggttttttttagggtttattttattgtattttattatactttaagttttagggtacatgtgcacaatgtgcagtttagctacatatgtatacatgtgccatgctggtgtgctgcacccattaactcatcatttagcattaggtatatctcctaatgctatccctccccactccccccaccccacaacagtccccagagtgtgatgttcccattcctgtgtccatgtgttctcattgttcaattcccacctatgagtgagaaaatgcggtgtttggttttttgtccttgcgatagtttactgagaatgatgatttccaatttcatccatttccttacaaaggacatgaactcatcattttttatggctgcatagtattccatggtgtatatgtgccacattttcttaatccagtctatcattgttggacatttgggttggttccaagtctttgctattgtgaatagtgccacaataaacatacgtgtgcatgtgtctttatagcagcatgatttatagtcctttgggtatatacccagtaatgggatggctgggtcaaatggtatttctagttctagatccctgaggaatcgccacactgacttccataatggttgaactagtttacagtcccaccaacagtgtaaaagtgttcttatttctccacatcctctccagcacctgttgtttcctgactttttaatgattgccattctaactggtgtgagatggtatatcattgtggttttgatttgcatttctctgatggccagtgatgatgagcattttttcatttgtctgatggctgcataaatgtcttcttttgagaagtgtctgttcatgtccttcgcccactttttgatggggttgtttggttttttcttgtaaatttgtttgagttcattgtagattctggatattagccctttgtcagatgagtaggttgtgaaaattttctcccattttgtaggttgcctgttcactctgatggtagtttcttttgctgtgcagaagctctttagtttaattagatcccatttgttaactctggcttttgttgccattgcttttggtgttttagacatgaagtccttgcccatgcctatgtcctgaatggtaatgcctaggttttgttctagggtttttatggttttaggtctaacgtttaagtctttaatctatcttgaattaatttttgtataaggtgtaaggaagggatccagtttcagctttctacatatggctagccagttttcccagaaccatttattaaatagggaatcctttccctatttcttgtttttgtcaggtttctcaaagatcagatagttgtagatatgcggtgttatttctgagggctctgttctgttccattgatctatatctctgttttggtaccagtaccatgctgttttggttactgtagccttgtagtatagtttgaagtcaggtagcgtgatgcctccagctttgttgttttggcttaggattgacttggcgatgtgggctctcttttggttccatatgaactttaaagtagttttttccaattctgtgaagaaagtcattggtagcttgatggggatggcattgaatctgtaaattaccttgggcagtatggccattttcacgatattgattcttcctacccatgagcatggaatgttcttccacttgtatcctctttaatttccttgagcagtggtttgtagttctccttgaagaggtccttcacgtcccttgtaagttgggtccctaggtattttattctctttgaagcaattgtgaatggtagttcactcatgatttggctctctgtctgttattggtgtataagaatgcttgtgatttgatttttgtacattgattttgtatcctgagactttgctgaagttgcttatcagcttaaggagattttgggctgagacaatggggttttctagatatacagtcatgtcatctgcaaacagggacaatttgacttcctcttttcctaattgaataccctttatttcattctcctgcctaattgccctggccagaacttccaacactatgttgaataggagtggcgagagagggcatcactgtcttgtgccagttttcaaagggaatgcttccagtttttgcccattcagtatgatattggctgtgggttagtcatagatagctcttatgattttgagatacgtcccatcaatacctaatttattgagagtttttagcatgaagggttgttaaattttgtcaaaggccttttctgcatctattgagataatcatgtggtttttgtctttggttctgtttatatgctggattacatttattgatttgcgtatgttgaaccagccttgcatcccagggatgaagcccacttgatcatggtggataagctttttgatgtgctgctggattcgttttgccagtattttattgaggatttttgcatcaatgttcatcaaggatattggtctaaaattctctttttcgattgtgtctctgcccggctttggtatcaggatgatgctggcctcataacatgagttagggaggattccctctttttctattgattggaatagtttcagaaggaatggtaccagttcctccttgtacctctggtagaattcggctgtgaatccatctggtcctggactctttttggttggtaagctattgattattgccacaatttcagagcctgttattgctctattcagagattcagcttcttcttggtttagtcttgggagggtgtatgtgtcaaggaatttatccatttcttctagattttctagtttatttgtgtaaaggtgtttgtagtattctcttatggtagtttgtatttctgcagtatcagtggtgatgtcccctttatcattttttattgcatctatttgattcttctctcttttcttctttattagtcttgctagcagtctatcaattttgttgatcctttcaaaaaaccagatcctggattcattaattttttgaagggttttttgtgtctctatttccttcagttgtgctctgattttagttatttcttgccttctgctagcttttgaatgtgtttgctcttgcttttctagttcttttagttgtgatgttagggtgtcaattttggatctctcctgctttctcttgtgggcatttagtgctataaatttccctctacacactgctttgaatgtgtcccagagagtctggtatgttgtgtctttgttctcgttggtttcaaagaacatctttatttctgccttcatttcattatgtacccagtagtcattcaggagcagattgttcagtttccgtgtagttgagcagttttgagtgagtttcttaatcctgagttctagtttgattgcactgttgtctgagagacagtttgttataatttctgttcttttacatttgctgaggagagctttacttccaactatgtggtcagttttggaataggtgtggtgtggtgctgaaaaaaatgtatattctgttgatttggggtggagagttctgtagatgtctattaggtccccttggtgcagagctgagttgaattcctgtgtatccttgttaactttctgtctcgttgatctgtctaatgttgacagtggggtgttaaattctcccattattattgtgtgggagtctaagtctctttgtaggtcactcaggacttgctttatgaatctgggtgctcctgtactgggtgcatatatatttaggatagttagcttttcttgttgaattgatccctttaccattatgtaatggccttctttgtctcttttgatctttgttggtttaaagtctgttttatcagagagtaggattgcaacccttgcctttttttgttttccatttgcttggtagatcttcctccatccttttattttgagcctatgtgtgtctctgcacgtgagatgggtttcctgaatacagcacactgatgggacttgactctttatctaatttgccagtctgtgtcttgcaaggggctagggagttccctttcctagtcaaagaaaggggtgacagatggcacctggaaaatcaggtcactcccaccctaatactgagagtttccgacaggcttaaaaaatggcgcaccaggagattatatcctgcacctggctcggagggtcctacacccacagattctcactgatggctagcacagcagtctgagatcaaactgcaaggcggcagcgaggctgggggaggggtgctcgccattacccaggcttgcttaggtaaacaaagcagccagaaagctccaactgggtggagcccaccacagctcaaggatgcctgcctgcctctgtaggctccacctctgggggcagggcacagacaaacaaaaagacagcagtaacctctgcagacttaaatgtccctgtctgacagctttgaagagagcagtggttctcccagcacgcagctggagatctgagaaggggcagactgcctcctcaagtgggtgcctgacccctgacccccgagcagcctaactgggaggcacctcccagtaggggcagactgactgctcacacagccgggtactcctctgagacagaacttccagaggaacgatcagacagcagcattcgtggttcatgaaaatccgctgttctgcggccaccgctgctgatacccaggcaaacagggtctggagtggacctctagtaaactccaacagacctgcagctgagggtcctgtctgttagaaggaaaactaacaagcagaaaggacatccacaccaaaaacccatctgtacatcaccatcatcaaagaccaaaagtagataaaaccacaaagatggggaaaaggaaaaaacagagcagaaaaactggaaactctaaaaagcagagtgcctctcctcctccaatggaacgcagttcctcaccagcaacgtaacaaagctgggcagagaatgactttgacgagttgagagaagaaggcttcagacgatcaaactactccgagctacaggaggaaattcaaaccaaaggcaaacaagttgaaaattttgaaaataatttagacgaatgtataactagaataaccaatacagagaagtgcttaaaggagctgatggagctgagagccaaggctcgagaactacgtgaagaatgcagaagcctcaggagccgatgcgatcaactggaagaaagggtatcagtgatggaagatgaaatgaatgaaatgaagtgagaagggaagtttagagaaaaaagaataaaaagaaatgaacaaagcctccaagaaatatgggactatgtgaaacgaccaaatctacgtctgattggtgtacctgaaagtgacggggagaatggaaccaagttggaaaacactctgcaggatattatccaggagaacttccccaatctagcaaggcaggccaacattcagattcaggaaatacagagaacgccacaaagatactccttgagaagagcaactccaagacacataatcgtcagattcaccaaaattgaaatgaaagaaaaaatgttaagggcagccagagagaaaggtcgggatacccacaaagggaagcccatcagactaacagcggatctctcagcagaaactctacaagccagaagagagtgggggccaatattcaacattcttaaagaaaagaattttcaacccagaatttcatatccagccaaactaagcttcataagtgaaggagaaataaaatcctttacagacaagcaaatgctgagagattttctcaccaccaggcctgccctaaagagctcctgaaggaagcgctaaacatggaaaggaacaaccggttccagccactgcaaaatcatgccaaattgtaaagattatcgagactaggaagaaactgcatcaattaatgagcaaaataaccagctaacatcataatgacaggatcaaattcacacataacaatattaactttaaatgtaaatggactaaatggtccagttaaaaggaatttaggtttgtgattggacactcgggtggactctccaaaagtctcactaaaatatatgaagacatagaggataaacaaaaatttaatgagatgggagaattgcctgagcctaggaggcaaaggttgtggtgagctgagattatgccactgcaccccagcctgggtaacagaaagagaccctgtctcaaaaaaaaaaaaaaaaaattaaaggaacaataaaaagttgactttcagccaattgtcagaatggccaagaaattttcacaaatattccatttagtgaacttcacatatggatttaaactttgagtgatgggattcagcagtagtagtccttctttactactcctaatttctgaccaggtatttctgagggtatgtatatatgattgtatacatcaaagagcaattataaggatactgtaataagtggttcagattttattttttgtgtttgttttctaaactacgaatagataaaaatagagaaatgaagcacttggcacttttatacctactttaaggcaagcaggattgctcttgttctgatgccataggatagaacctacagtgaaggaagcctcttcatttctcttcgtttctgcgagcaagcagttgttggaagcaatgcctaatgtttaagaggtctaattttcagaagccatgatcttcaagtagaatcagagacttcaagtttcctgtctatttactgtgaattttgtagtttacatatatcccttctatacagagtgttagaggtcaaggcaaggaggaaaagttaaaaccctccacctttagtcttgtagagtcccataaaaatctgctagattctgccaatttggctttgatccagacccgttagcatcaatgttgtgtgtgtctctagtcctgaaaaggggattttcccaaacaagcagacagaaaaagcagggcaattcacactgggttgaaacaagaagatacagaatggataggaaaatacgtgggaaatggaaagacaatacagaatcaaaaatacagcagcacaaataaaatacacattgctgttgtgacagagcagaattgagatcatggaaaattgaatgtgttgtgaaggatagccataggaatttctccagaaaatgtagaaaaatatgacagagtaatcaaaattatgaaagagaaggtgacaatgagacaacccaaaatgaattcatgatgaagtagcaggatgggagtgggggagcagaataatgaatatacatttatattcataaatgaaattgatctaaaacttttatttgatgctttaaaaaattgactagcaattaattttatattaattgctgggaaattaaattcaacagcacattaaaagatatagccatcctgaccaaagaagaatattccaggaatgcaaagatggcttaatattatgaacattattaacataatatactatataactgtatccaatatgaaaaagcttaattcttttgaaatgatctggaaactcattctaaaatttcagtatcactttctgtttaaaatcttagaaaactaaaagtagtttatgataaatattaatattgagaatatacatcataaaccaaaagtcaaactcacacttaatgagtgagtttactattaaaaatagttccattaaaataaaagtcaagacaaagatatataccatgaacattgttatttaatattgttgtgaaagttatgtgtgacacatgtaacatgaaagaagtgacgtatcattctagaaaataccattattgttaatagagatgctctgttcatatacctaggaaatgtgaagagttaatttaaatctcagaattaattaaagtataagatagtgagatgataatggtgatgcttaaggtattatatcggctgccttttattaaggagattttgtgtaccaggctctgagttaggcagctttcacaaagaatcattttataaatgagaaaaacaataccaaggcctgaggtccattggtacttgaggtcagatctgactgattccaaggcttatactcttggacccagtgttccactgtacagtagacacacaaacaattgctttcctatacaccagcattcaaactagcaaaaacgaagtataaaacactcattcttaaataatatatgggactgaaagaaacaacataactacttcagcatagagaagcagctttgaatatatgacaaaacacaatatgttcttatagtagaagactcatagtaaatacagcgtttatttcaaattgagttatattaaattgagttataataaaagactcataatatggcatttagttcaaattagaaatgaatatggcagttatttcaaattaagtcaattacaaaattgaaatgagcttttttctaagacacataaaattactttaaaatttaagagcaagaggaaacaggaaaaaatcactaagcaactttttcacctagatgaaaggtgaaaaaggacatacataacagattatttaaaccaatttcaaaattataataactaagacaatgttttctggcacaagaaccagtagattaaaccaatggaacagagaactctgaaatagtcttcgtatttccaagaatatcgcatataaaagaagacactcaaaccaattgtcagggaaacaaaagatgttttattaaacagataatcaatggataaattagctatttatttagaaaaaagtctaagtattaacttttcttcatactatgtatcaaaataaatagtagactaaaattttaacaattgtactaaattaaactattaaaaaagaaaaaagataggtgtatgtttatcctatttgaaaatcatttcaccataaagacacatgcatacatgtgttcatcacagcactattcacaatagcaaagacatggaaccagcctagatgcccatcagcagtggactgaataaagaaaatgcggtatataaacaccatggaatactacacagcatatgaaagtgaaatcatggcctttgcaacaacatggatgaagctggaggccattatcctaagcaaattaacatagaagcagaaaaccaaataccgttctcactcggaagtgggaactaaacactaagtacacatggacacaaagaagggagcaatagacactggggcctatttgagagaggaggttaggaggagggtgaggatagaaactacctatgatgattaactaggtgacaaaattctctatacaccaaacccatgcaacatgcaatttatacatgtaacaaacctgcacatgtaccccttgaacctaaaataaatgttggcaagaaaaaagttgaattttattttaaaaattttatactagtaaattagcttctgtctagtcaaataaactagtgtatctagaaaatatatgattttctgcttttgtctattagagtcataaaataatattaatgtatttcctaatattaaacaacctctgcatctctgaaaaaaagagaaaatggtaaaggaaagctttgtaaagataaaataaatggaaaaatatcagtgaaaatattgcaaatatttgactgcatattgtctttaattttttatatatcaaaaaaagaacaaaattagaagacgaatatgaaacagtgttcataagacaacaataatgcaattgcttcagaatcaaggtctatgacttctcactcagagagtatgatgtcataaaatagctgtatcctcaacaaaagctttgtagtcaacacagtaacaccagtgggttttctcttacaacatccctcagtgtaggtttaatatcaaacataatatcaagtggtaagtcaataaaagcaactctgagctgctctggcttaaaatagagatagatatttaaagttatttgagcaatagatggaaaaaagccaataacttatgtgcaaaaactcttaaaactcagtttgcgaagacatgcaaagtgaagcaatggtgagctatttttgagtatcaaattggtaaaatatttaaaggcaatatataattcaaagataatgatgaggtagataattttataccctactcatgatattgcactttgttatacatcatgggggaaaaaattaaaattattccctgtgtgtcctaattgatgttatttagggatgttccttagcttatgtgtgttaaaccctctatttctggatcccatacatttctcacccttagtatatttacttatttttctgggacttagtttgataacttcctgagatattctaagcattctgagaaactttagataaaatttgcatatttgaaaatgtttttattctatcctcatacttaataatttgattgggtataaaattttatattgaaaacaatttttaattaagtatttatagccaatattctagtttcttctatcagttatagagagggctgatctcatctgttatctgctctttgatttaaattatatatatgcacatccatatatatatttatatattttctctctttcaaattgttttatccttttggtaggatctactctttatctcttgtgatctggttttcacaacctggattttccttttaatttcttgttttactctcagctcttttctatgtggaaaattttatttttaggtctggaaattctctggtgttatctgtttatcattttttcttcccattttctccattctttcttttagtcattctcccctctgatttattttgttttgtttctcctatttgaattttgctttctcttttgggagatttctttgatatcatacctgtaacttattttttattgatcattatattttaacttttgtacaactctttctgcttttgatagtttttaaaataatgttgtatttataatcgaacaataattgtatttttatggggtgtgtagtgatgttccagtgcacgaatacattgtataatgatcaaatcggggtaattaccatatccatcactctaagcatttatcatttctttgtggagataagatttaaaatcttcgaggtatcttgagatatacactatattgttatttgctgtaatctccctactgtgtaatgaaacaacagaaatgtttcttcctaactataactttgtattcattgactaacctatccaggcccctgctccccctacccctccccagtctcttaataccacttttctactctctacttccatgaaatcaactttttcagattccacatgtgagtgagttcatgcagtatttgtcttactctgcctggcttatttcacttaacgtaataccctgcaggttcatccatgttgccacaaatgaaaggatttcattctgttttatggctgaatagtattccattgcgtacataccacattttctttatttatctatagatggccatttagtttgattccatatcttggctgttgtgaatagtgctgcaataaacatgggagcacagatatctcttcagcatattgatatcattttctttggtggtttcttcttgattgcattatcttttggatgcagttcattctgtactgtctctgaagatgttagctatgtttggtttttttcttacagtttcccttcaatgcgtatataaatctctatatcttctgcctcattattcatttatttattttgattatttgttttggtttctctagttcatgtaaaaaaaaagacttctgaaatgtctggagattcaagacatcctcaatttagtttttaagtgtgagatattaaaaagttgattggaagccttgagtatgtgagtgaaatttaacagctagggagctttattgcagaggagattgagtggtaagctcttccttttactgtggctgacaaatgtgagtatcttcaggtcttttctctggggataaacaatttcttagaaggatcctcagatctccgtcatgaaagcaatgtgcctttctgtaaaaaagggatcagtggatgaatggtagtcccagctttcaatatgcagactttcatttcatttccttgctttcagtttcctgtctcaattacagccttccactagttttgatatctggagtatctctagtacacttctataaaaataaatttctgtctcacgcctgtaatcctaacaccttgggaggctgaggtgggcggatcacctaaggtgaggagtttgagaccagcttggccaacatggtgaaaccccatctctactaaaaatacaaaaattagccaggcatggtcatgcacacctgttgtcccagctactcggaggctgaggcaggagaatcgctcgaactccggaggcggaggttgcggtgacccaagatcgcaccactgcactccagcctgagttacagagccagactccatctcaagtaaacaaacaaacaaacaaacaaacaaacaaatctctgtctccagtggaccactagaaacctgattgcacagggttgtgatggaaactggggtccaattggctctatataccatcttcagacagtcttcacatttcacccactgtgcctccctgcttgaactgtgctctccagtaccctgtctttagctgcctttttgggagttctacatgttgaatgttcttttttttctactaagtcagttatcattttacaatctgcttttcatcttccaaaacttctcatatatgtgtggggaatctgccatgtttaaacaaagtatggggtatgcttaatgtaatttcaaaaacaatcccttggaaattgtaatatcagaatctaatgtcttacagattcaccactatgctcactacctgggtgacaggatcattcatatcacagacttcagcatcatgcaatatactcatggaacaaatctgcatgtccgtcacctgaatctagaatcaaagttgaatttttttaagaagtcatatattttaaaagtcaatttctgccattcagaagctcaagtttagtgtctgcaaagagctgtgggaaaaaaaaaatttttacgaaataccattgtcttagtaagagtgtaatatatatttatgtatatatgtgttagagtgtgcatatatatctacacacagttaaaattcatacactgatagtaaatttcattgtgcaagaaaaacagattattatctgcactgtcagaattcagggttatagatttctctagccctttgcatcattactacataacagaaaactttgtttcttcctaaatgatgctttattttcaactgtacacatcagattatcctcatttggctgtcctcatttttctctgcatattttgaaacttttagaggggagcaacaacaggaaatctgtttgggggtttaataaaaccaccaggtatttggcataattgcagctctgatctgtgactttttaaatctaggcattgagttaagaacattaagaaacattgaactatcacagcttagtcatgtgccggcacattatcaacaacaatggcacatctctttccctgtccatttactttctgtagtttctggttgttctgccctgaactgtaatgtgataaggggcagtcagaaagtaaatgtaacttttaaaaattagattatcaaaaacacagatttgttatagactggcgcattacttttggcttttctggtactttcttatgagatgaagcccctgagtaggcaaactttcactaacatttctggtagttactagtagttaggtattgctcaagacagaaagaaacattttagaataaggaaaatattaagctgcaatcaagagaaattctttttaatctttgcatttcctggaacagactgagtcatgagatgaattgacagtaaacacttaacactggcacattagtcagagttagtcacataaggtgaactaggcaatcacaaactaaataaatagatcagaaatcccaaagacaaagggctaaatatagtagaatgctcagaaacagcaataaggatgcatggtgtgaagtaagttgaataggagagtgaatagttgacaatgagattggaggactaaccagagatcatgtaggccctgcatggattttgggatttattctaattgttaaggtagttatatgatctaatttcaatttctaaataaatgggcaccatggctgttgtgtagcagacagactatacagcataagaatggggacagggcaattatttttaaagctaattcaggaatctaagcaagagacagttgtggtttagaccagtgtagtagcaatggaggaattggaggagggagaatgttgtgttcagaatatgttttagagaaggtcaatgggattaactgatgggttgaatgtgtgatacaagaggaaagggaattataaataacttcaaatagtttgggctgagcatgtgaacaaacagtagtgccattttaagtaaactctggagaacagctttatggcaaaagagtaagggaggaggatcaatagttcatttctgatttgaggggcattttgtttgtttgtttatttgtttgttttgtgttttttgtgttctctttttttttttaatttcaactctcattttagattcaagggtacacgtgcaggtctgttacatgggtaatttgtgtgatgctggggtttgggatatgaatgatcctgtcacccaggtagtgagcttagtacccagtgagttgtttttcaacccttacctcctttccttcctccctttctctggtagtcccaagtgtctgttgttcccatctatatgtccatgtatacccagtgtttagctcccacttataaacgagaatatacagtatttggttttctgttcctgcgttaattcacttaggataatggcctccagatgcatccaggttgcttcaaaagacatgatcttattcttttttatggctgcatagtattccatggtgtgtatgtaccagattttctttattcagttcaccattgatgggcacctgggttgtttccgtgtctttgctatggtgaatagtgctgtgatgaacatacaagcacatgtgtctttttggtagaacaatttatttccctttggatatatacccagtaatgagattgctgcattaaatgctggttctgttttaagttctttgagaaatctccaaactgctttccacagtggctgaactaatttacattctcaccaacagtgtataagcattcccttttctccacaacctcaccagtatctgttgtttgttgacttttttttttttttttttgagacagagtcttgctgtgtcacatttgttgacttcttaatagccattctgactggtgtgagatggtaaccctttgtggttttgattttcatttctctggtgattaatgatgttgaacattttttcattttttcattgttgcccacttgtatgtcttcttttgagaagtgcctgttcatgtcttttgccagctttttaatggagttatttatgttttgctggttgacttgtttaagtttcttatagattctggatattagacttttgttggacgcatagtttgcaaatatttcctcccattctgtaggctctctgtttaagctgttggtaatttcttttgctgtgctgaagctatttagtttacttaggtcacacttgtcaatttttgttgttgttgcaattgcttttgagaacttagtcataagatttaaatataagaccattaagagtcctagaagaaaacctaggaaacaccattctggacatcagccttgggaaagaatagttctttttggatatgttgaacttaagacatcttatcagacatccaaatgaagatatagattaactagttagatatttgaccctgaagttcaaggagaagaaagaactgaatacataaattgaaccttcatgccataaacatgttataaaaagttgtggaacctgttgagataaactaagaaatgcatacagataaagaaaaaaaagaggtccaatggctattttagcattttatgaacaggaagagtaagaagatccagcaaaagaagctgagaggaagaagatcaggagaaggcatgataagccatgtgcagtgagatagctatgcacatgtctatgcctcaaggagagaggaagctaacaggaagctgacttatcatggaaaagaactgaaggaagatttcctggaaagaggaaggattgagataaattaatcttcaaggttttaggcttataaataattggcaaactattatccacctcttctagaatctaaatcttgctccctttaaggtgtgtgcattcttataggaaatagatgacatatattcaaacacctcaatttttagaaatttcaaaatttctaaagccactttcacatactcataataaccctgaatgacaaatgtttgtaactactattacgcagagtttacaggtaaaggaaaataaggtgaacagatctgcccaaaggcaaatagaccactgcaaagtgacaaaattgggagtagaacctcttgccctctgaatcctagattcttatacttttcactccattacctattgcagtagaaaatttggtacctgtcaaaggagcaattcaaacaaagatctgtaggagctccatgggggagtgatcacttcttactggaaggatcagggaagactttgtgggagagataacattttaactaaaacttgaagaaagaatatgattccaggataaaagttacctagtcatggtattccatgctctggatgattttgtcccagcttacatctccagccttttctgttgccatcccctgccactgccccaggccataatcaaccatactgagctactcacacttttacctaatgccaaggttgctcttgcttctatacctatggtacctacaagcatactgctaccttagacacagaggcatttctacccttagaaccagcttctcagtccaatattttccttacactccccaaactactttagaagcccttacccctgattccatgcatcttatgcatcctgtgcatctctctcgtgtttatatcatattctacatataatttcttatctgtgaacttcaggggatcagagacttgcctggcatataactgatccctagacccacacactaggatacaatggttaccaaccagcactgatcactttttgacaacctggagcaacttcctgtgtaatagaacatattatgttggtgcaaaagtaattgcgcgttttgccattgaaagtaatggcagaaactgcagttacatttgcaccaacctaatagtaaatgctggtttctgctttatcatcatgaatgagtatttgtactttggttcatattattttgtattagtccatttcgccttgctataaaggaatacccaaggctgggtaatttataaagaaaagaggtttaattgtttccaggttctgcagactctacaagaagcatagtgctggcatctgcttctagtgaggacctcaggaagcttctgatcatcggggaaaacaaagggagagcagatcagatgtgtcacatggcaagagagggcacaagagagatgccaggctcttttaaacaagcggctcaggtgtgaaataatagattgctagaactcatgcattaccacagggatggtaccacacccttcatgagagatctgcccccatggcccaaatataacccactgggccccacctctgacagcggggattacatttcaacctgagatttggaggggacaaatatacaaaccatatcatgttctaggttccttgaatttagatgtatatatccaaattcatatttattttctcgtttttattctttaaaatgtaagctgctaaagtaaatattgccttaactttatgttgtataaaatctcctatttagcacaataggcatcaaagaataattcacaggctgtgatgataataatttagagttttgttctttcttcaaaagtaaatgtttccttcaactttaccctgaaaattcaagaggaaaattgaaatgatggcttgtgaactttttgttgcatatacatttcattattgccttatccctggaatattattactaaataattttgtttcagaattgtacagatatcaagaaatattggggcttcagggtttcaaataatgcaaaagacatatcagacaagcaagacacttgcattttaatatgtgtgaactcatgcaagaaagagaacaggattgagagagctggataaatgtcttacaaaaaagcaataaacatacaaatcctccaggaaaactggtgcagtaattcaatcacatattgacaatgtctatattcctagataaatgcaaaaagactttccaatttataaatagcttaccaccttccttagtcctctctccacactgtttaaagtccatgacaggtaaacacacaaaagcaaagatttacactttaaaggtttaactgccattttgcagtcagtatggaggtaattgtactatattaaaaagtggtatcttgtgagagggagtagtttagttggagtatagatgaagagctagtctgtgcctcaaacatattttatataattctgcattgattttctgcattccttttttgcaaagattttaggatcagaaaatattgcgtttcacccttggccttgttgggcccatggcaaactatattttgaaaggcctgaacagttagagaattatgtttctaaaatttatctttttgctggatactattagcaaatttgacttaaaacacatttaattttgaaaattgtatgtcataacattaaaatacagtcatctacaagttgtttgaaataactatttggcatttaatgaaaggaaacatcccacatttctgtctcctctttaattttatagtaacacccgtaaaatgcccttatttctgattcccttaggcaactttagggttgaaagttttgtacattgacttcagcttaaatgtgatttaacatttaatatccactctcctctgaaactgacgggagaaaacacacttgtttcattttagcacaactgaaaataaagaccagtgataggccacatcctacttatctgatctcagagacaccttataatagaaagttcagggttctgattgttcaatattctaaagcagtcattcatgtaagttccatcagaaagatatgaaatagcttgtagtaacgtatcttttcctcagtcaaaaagaaaaaaagcttgaactgagtgaagatcactatgtcattaatctacttaaagattaacctttttaaacagccaagatgtgtaacgtacttgttcttattcaaagttcaattgtgttcagcaccatggaaagttttatgattgaatatatgtaattatagtatatagagattaaaaataactcaagggattgaacaaagttttccagtagttaatcattaatgaagatcttaaatctgtactttaaatacagacaaaactagttataatgatctcattagtgccttattaaggttatctattttagtatttgtcaggacaattcagacggaaatgaacttcttaacatgtttaggagaggttgatgatcgtttactcagttaaaagacataccatagctgattaattgctgtgcaaataaagagtcagactagaagcaacagaatagctaaatgtagcccattctgaaatttaactttcatgcttgtgctctctgccacatttttgtttgtttttattcatgaggccagaaaatatgttttaaaatatagaggaagttggagaaaaagtagagaaaaagtaaacaagactgtgagttttattttcctaggacttggctgagtgtcaaattgaatggagacctttcacaggcgttcaaaacttgtgtttttaaaagagaaaaatgtgctggtttgcctttgacaaagtctgttgctctaagttcaaattgcagaaagaataaaatttttcagaaagaggctagcaattacttacggtatcagtttgctcttaaaaaggaacactgtgatataagggcaactgaagctgcagttattgatataaatatacttcagggagaagaacagagtgaatgtcaaatcatcagggaacatgcttgagatcaattattcaaagtgtggaagtccttccatttggatattgtgattcaatagttcaccaagtgggagaaaggagaatgcagctatttgaggatgtggtaaggtacaaaacagtagtgagtagggactaaattgaaaatgatctatatatttatgccctagtaatttcttttaatctgcattagcaaaacatgcttttatggggttttcaaaatataatatcggcagaatgtggagaatatgcagatttcttgaaaaaggttgaatttaaaatagcaatctctctttgatctttattacaatttttcctccagtacacattacctcttctaagaggacaggtgaggctttgataagtattgccatatctgattgatctctaaagcccaaagaacctacttgcttaaagtttttctgagctggtcctttttgtctaattccacaagattatctctgggaatactgcaattaacttcttcctgattttattttatttctctcccttctgtccattctctacactacatttaattttcttttattttcaaaatccttgttaatgatgtccacaagctcattcctaagaacgtttctatccttagctttccctgcctgcccccaggctcagctgtgctccagtcagagggaactgttctactctctaatgcaccatgctccccacactccgtgccttatctcttgtctggggaaatcccagcttccttcaatgtgccaacaaaccttctctatgaattctttagctgaatttgatgcttcctttgatgggaaacatactttcagtgtgtttctgtcaaaggacttatcattttgtgtggttactgcatttctcttttagcagtttgcaagttctttcagcacagaaatgtcctcttggtcattttttaaatcttgcattagcaaagtacctggtatgtagtagtaggcactcaataaacacttggggaaagaataaaagaggcaggtattaagagcagaaatcttcctgaataaatttgctcgaaatatgtaagagtttgtgagagaacttacataactaacttctccttaaactgtttaaataggcaaggatggctcttgaagaacataaccagacaaagtttatctttgtccctctcacttttacttcctcttttagcagacaaattcccagtgttcacagcacctttcttcatttgagacaaacatttttctcccaaactctaccttatgtagcaattgtttatatatgaaatattttctggccccacacttgcagcagagcttaccagccccatgttttaccctctcacagcctttagagcacaggtccatatgaatggggaatggtgtaaatgttgtagttaatgatctttcacagaaaatgtgtgtgtgttttaattagatttttctagatttaacacaaaggaatagcttgaatatgagaaatatcagcacttggttgagatattgcaagaacacagattggggtagggaagaataaaaaattatagtctatacacattctactggaatattatgatgcctctcaaccgcaagatgaccatatatctttcctttgggaagactaaacccattctccggttgtttatgaatttagactcctaatgggaaattgttagtgattctattgctttctttactacttttcttgcctcctctcttcctttaacaaatagagtgctttctatatgccactctgctggaatggcatgaaggaaacatacatggccccaggccttcgtggtgcttataacctatgtccctccgaaaagcacctgaaatatggaagagtttacagttcttcatttgagccaaatgatgtgacataatctcatatgcttttcagagggaatttgggcaattaaatcttatcataaatttgctgatgaagtaatttacttggaaagatattgagcgctgtgtactgaattgtgcccctccctccaaagttcatatgttgaagccctaacctcctaacctccaatgtgactgtatttggagataaagcctgtgaagaggtgctgaaagttaaatgaagtcataagggtgggtccctaatgcaatagggctggtgactttataagaagaggaagagatatcagagctctctctctaccatgtgagtgaggacgcagtgagaaagcagccatctccaagctaggaagagagccctcaccaggaactgaatcagccagcacctcaaccaccgacttcccagcctttggaactataagaaataaatctctgttcattataaattacccagtctttggtattctgttaaaacactataaaatggactaagacaggaaattggtaccgagaagtgtgactgctgctataacaaatatctgaaaatgtggaaatgactttggaactgggtaacgggtagaggctagaacagtttggaggagaaggctagaaaaagcctaggtttccatgaatagagctttcaggacaattctggtgagggctcagaagaagacaagagctacagggagagcctaaatcttcttagggattacttaggtggtcataatcagaatgttgtagaaatgtggatggtaaggggcattctgataagatttcagatggaaataacgaatgtggtattggagacttgagtaaaaagctatccttgtgcagttgcaaaaaaaaatgtggtagaattgtgtctatgttctaggatttcgtggaagacagaacttaagaagaactatctaaacaacatctggcaggataaatatctaagcaacaaagcattcaaggtgctatatggtggcagcttacagtaaaatgagagagagaaatgttttaaagatggaacttataattaaaagggaaacagaacagaaaacattgaaaaactctcaacttagccacataaagaataaaagaatgtgttcaggagggaatactaagtgtgtggctaagcgactgtttgctaaagagattaatatggatagaagaaatccaggttttattcatcaagactatgggagaatgaccatggaggcatttctgagatcttcaaggcaagttaggtaggacattgaaggcagggtttctagacaggggctcatatcggacctcagcattaggtgccctgcactatcttgagactttgttccctgaatttttgtccatcaccctcagcttccccagcagtggctcaagcaatcctaggggcaccttgatccatcactccagaaggtataagctgcaaaccttcacagtgtccacatagtgctaattcttcaagaatatagaatacaggagctctggggccatggcaccctccacctagatttcaaaggatctctcggttagcctgggtccctaagaagagacttgtcataggcacagagccactgcaaagagctattactagggcaatgcacagcagagtgcaggagtgagactactgcagggaatccccactttgacattacttagtagagccatgggagtgaggcagtccctggaccccagaactgtggtgccaccagcatgcaactgtagcctaggagaactgcgggcataagacgccaaattgtgagagctgctgagtgtactgaacccatcaaagccataaacagggctgcccaatccctaggggcccaacccctgccccagtgtgtccaggaggtgggacatagagtcaaaacatattattctctagctttaaaatttaatgttcccttcttgtggtttggacttacatgaaacaagttactccttttttcttgcctatttctttcttttggaacgggaatgtctatcctatgcttgtctcaccattgtgtttttggaagtagataacttgttcgatttcccagactgatgggaatttgcctcaagatgaattgtgccttgggtttcccccatatctgactttcatgacactctggactttggacttaggagttcgtgctggaatgggttaaagccattgggatggaatgaacatattttgtatatgagaaggacatgattttgagggaccatggtggaatgctgtggtttgaatgtgtcccccaaaagcatttgttggaagcttaatccccaatgcaacagcaataagaggtgtgaggtgattaggccataagtctccaccctcatgaatggattaatgcccattcatgagggtgattcctgagaggtgataagccataaagctccaccctcatgaatggattaatgcccattataaaagcgcttgaggctgccagttcaatctctttctctcttgtgtgcgcctgtgccattctgccttccaccgtgggatgacacagcaggaaggctctcaccagatgcaggccccttgaccttggatttcccagcttctggaactgtaaaaaatgaatctgatcttcaatctgaaactgtaagaaatgaatctgatcttcaatcactgataccctttcttccacttgatcaaaaagtgggcaaaggatatgaacaggcacttctcaaaagaagacatttatgcagccaacagacacatgaaaaaaatgctcatcatcactggtcatcagagaaatgcaaataaaaaccacaatgagataccatctcacaccagttacaatggcagtcattaaaaagtcaggaaacaacagatgctggagaggatgtggagaaatagaaacgcttttacactgttggtgggagtgtaaactagttcaaccattgtggaagacagtgtggcaattcctcaaggatctagaactagaaataccatttgacccagtgatcccattacggggtatatacccaaaggattacaaatcatgttactataaagacacatgcacctgtatgtttattgcagcactgttcacaatagcaaagacttggaaccaacccaaatgtctatcaatgatagactggattaagaaaatgtggcacatatacaccgtggaatactatgcagctataaaaaaggatgagttcatgtcctttgcagagacatgaatgaatctggaagtcatcattctgagcaaattatcacaaggccaaaaaaccaaacaccccatgttctcactcataggtaggaattgaacgatgagaacacttggacacagggcagagaacatcagacactggggcctgtcatgaggtggggggcagggggagggatagcattaggagaaatacttaatgtaaatgacgagttaatgggtgcagcaaaccaacatggcacatgtatacctatgtaacaaacctgcccgttgtgcacatgtaccctagaacttaacgtataataataataaaaaaagaaatgaatatctgttcattacaaattacccagtctatagtattctgttatagcagcatacagcagattaagacaccaaagatgcagaaccctgaactgcaggacacagcaatgatttgtttaattgatattagatagcactcctagattttgtcttgatgtccttgtaccctctctccatggtgcagacgtatcttctcttaatagatgagcattctgaacactaatgtgctatttttcattctctagttagtattctcccttgatatgctaagccaattggatactgctgcctaggggcatttattaatacccttctgaactcaaaggaacaaatgacacagattttataacacaggatatccctgaaattcatattctactaaaaatattatgagctaattattgtgaaacttagattaagtttatttatttctagatgtccctattagctaaaaaacctggtgatcagcagtaactttattgtgtagtactatttgtctaaattcatgtgactttaaaagtaatttttacctttacttaaagcacaatgtatttaccaattaaaatgctgtagaatgcatctcatatagaaagtttaatttgtaaacttctgagtaaaggaatcaaatttagaccaaaatagagtgatggggttttcttagaaacttagtcatctaagtagagagtatcaaaattttctaacttatgagtagatagagtacatgtttgaaattgagcatgttagtcagagacctggaatgattaaagaaaaaattgtatttaaaagtttaataagaagattaaaaggtcacatttatctcaaacagtagtgatataaaaactatacactacataataaaaaacagataataagattttttgtacatcacaatgacacaaattctaccacattcaaactcccacaggtgggactgataaagacaaatgttattcttaaaacaattcttgtaggatatattacatctagatgttaaaatgctctgattcaattatttatccattaaacatatatttgtaaaagagcctaccatatgccaggtgctgttctaaattctgagcgtagagcattgagcagacaggaagcagggattgctgtggggaggagagaataaaaaatacataagaataatctcaaatacctctaactgttatgaaaatagcaaaactaggtggtataattgtgatagaaaaagagatgggactttagattaggggtcagagaagatgtctttgagaaatgacatttgggctaagacttgtatgaacagtgccaatcatgcaataatatggatttagaacaccaagaagagggaaaaggtcatgcaaaggacctactaccatgagcttgggaatttaagaaacaacaagtatcagtgaggcaggagtctgataaacaaggtgaaagtggtatgatgtaatttataacgaggattcccagtatctaataatggcactgtccacggatgaacgggacagtcttgctattactatctattggggtaaaattgaagggacaaggcaaaatataactgaaaactataaagttttgtctttctcataaccatatctttgacacatgctgaggaataacatttctctgaaaacaaaaacactttcaggtctcgaagtcatagtggttttatatttaagctttgccttgatcaagaaatatctgatgtgtggataaagacagcaaaaaggttgtagtcagcagacccaggttcgagtcccaatttaaatataaattagctttgccttgtggtgttgaattgtgctgttttgatccatctgagcacaatttattatctataaaatatggtaattgtgaagatcagctgacatttaggaagcttaagttagggacaatgatggaaaaatttattactgtgtaaaagttaaaataggatttagggatgtggcttatgcatttgtcttagcttagtaaaacaaatatgattaatggaaacggtattgtttcgacaaatcactggaattttcaattcagaaatgtataaagtgggaagagaagggttggctcacacctgtaattccaacactttgggagaccaagcagggaggattgcttgagctcaggagttcaagaccagcctgggcaacatggcaagacctcatctctactaaaaattagaaacaaaaaacataaaacaaaaaaatactagccaggcatggtggcgtgtgcctataatcccagctatttgagagggtgaggcaggaagatcgcttgagcccaagaatttgaggctgcaatgagttctgcacttcagcctgggcaacagagtaagactttgtccaaaaaaaaaaaaaaaaaaaaaaaaaaaaaaacagaattttgctattaagattcagaattggcagtcatagctatctgtaggtaaccaaaagaatctagatcatgatctggctcttccatttcagcctgattctcattgttgcagcattgatctgattttatctttagtcattattttagaaaaaaatagataaaagaaaaaagataatatcaagggctattttcagccatgttataagtacttgacatatattaaaattttgatcatcaaatgaagggggtaatttttcaattatctgaagtatgtgtttaacatgtttttgttgtggtggtagggtttattttgtttgttttggaaatattttggtcagaatctcaccatacccaatctcatagaatgttttgtcaggttcagtgaaaaggagaatgtagatgtccaattaattgatatctaatgaggaataaaagttagaaggcaaacaaatgtattaatttggaaaaatgctatttttcatatcatgtattatacttaatcaccatagagggtataggttttcatcagtgtactactgattcccactatattttcttaagtgtaattgttttaatggttcaacccttaaataataaataataatggctatataagcttcaaaacctcacagcatccttgtagcagaagattctaagtgcagagttattaaaattgtaaactatttgtttttaagtttgtgggaatcattacccatcatctcatctgtattacatttgtttttgaataaagattaacatttttttccaagcctttttctatattgtaatcatagtggggaaatggtatttcagacctcagataaaagctttatagtgatttcatgtgacagaattttatctgggtttcaaggaactctaataatagcatttacaattcttctatgcaatttcttctcttcttgttaccataggagtatggaaaacacgttcttggtttaaaaagctaaaagaaagaaaatcagcagtttaatctgagtattaggaaaaggatcacaaatcctgctatagtattttgtatttaagctagtttctgtaaaggcccctgacatgccctctgggagctaaatattgacaagcatgctttggcaatcaagatcaagcttgttgaattaacacagctcaagtcttgcattgacactataacccaacactgagaactgttatcttaccccatttattttggctttgtaggtgatactttatacttgaattagggatttgcactgtatcttaaatgctagaattgtggattaatttgatttgagaatatactagcccttatcatgttcacagtggaaattataaatgaagtgtaacattcattgttttctctcccagcatggatccagaatgaacctgctgtagacctaagtctgatattatcttctctatcagaaaatgtcttataattttcacctcctaaaaaaagaaaaagaaataagaagaattatattgttctttatatagcttctggtaaaagaaaatatatcccaaactgctaattctgtagaggcttcgttcagaagttaagacaaaatatagatcataaaagaaataaagattatttttcattactactctcaaaactttagaattttaaaaagttaaaattaattgtcttcaagttttagtggaaaatgtaacccatttttattgtccaggaagttgaagaacgaattgttaattactaggaataataatgataaaggtgatgatgttggtaagaactgacatttattaagggcttacaatgtgttcaaccctatgtggagcattttacatgcaatcgctcatctaactcacatgagatagatacttccattggcctcatttcatatatgaggaaaccaagactcaaagaacttaaggagcttatctggtcatgcccagtgtgcgtaaagattacctttattttctttccaatggatatacctacagtcaaagtagtaactagacatttctcctgcccttacggagctcacacattaaaagatgaggcaggtgggtattgctattattcaagatgttgttcccactcatgctagagagaacaaaaagaaaggaatctggtgattgaggatggtctaggagtgctccccaaaggatgtaatatttggtattagccttaacaaacaaagagaagaagacaaaaacaaaaaaaaattcaggcagtaggaatagcaggagaaatcacacagaggtgtgaataattatgatattttcaagaaacagcaaatagtttagtgtttaaggaattatcaggtagaagtcacatgaatgatgaaaaaaacttacggagttttaatgtcagaaacacactcaccagctgatgacctcagtaacttcactgtgaactgaagataatgccaaaaatcagacttcatagagctattatgaggaataaattagctaatgtatgccaaatgcctgcctagcctaagttctcaattctaaaaacacagttttatctcttaactaaattcataccctttgctaccttcagaagtaattttggaactgccatctcaaactattttctttaaataaaatagtcatttggcacaatttccctttgaattttcctgcttggcaagttaggagagagacacaaatcgttcttttttaaaaaaaaaaaaaaaaaaaaaaagatgcatagtcttttatcattttctcaaagaaagtcatcataacttcatccacactagcaagtgtcacttgatacttaattttctcatatttgtgcagttggatctctacattaattttggatagatgtgattgcagatacatatatttacaataaagtagctgtcataaaaataatgtattctaaagttaaaggtgtccatcacagtgcccagcgcatagaggcatccattagctccccttccctttctttcctttcaaatttatattaaaagccttttctgaatctacttcgaaaagctacatggaaagagaactccagacattttgccagtgacttgtttgtcatgtgtttgtcatacgtcttcacaattctagactaagtcttcacaatccagcaactatttacacccctatctacaattcagtgatcatttacaaactgtttacttatggtgaacgattatctcttcattctgtgaaaacaaaatatgtgttctcacttgcatgccttctttgaaaacatttctgaagtttgatatgcctgtggtccatttatctgattttgtacttaaaatgcttactgcctccatgtactttctggaacttgcctgctctctgaactccctctggactgtctgctacattcccctggcatttagatttcgtacattatatagttatgttcagtctgcagatcctctctccagcaaaatataactccatttaggttaggaacctgatttttctgtttatttgacacagagtgaagttttgctttggaaaatgaaaatcaccatgtgtccttttgttttgtatttgagtgttttttgtttgtttctactaaaccacacattcaataaagtttatccatgcaactatttcataaattactgaaacattctaattttatggtaattttaagacttacacaaatatttttcaattgtatacttatacaacaaattaatatcttctcaagcaacacttttaataattatttaaatttgttactcttcagattaaatgacctacagccatcacacctctccagaatactttcattgtcttttttggctatatctctatattttatttgttataaatatgatagtacagaatactatcatataagtttcattaccaaaaaagatacagaaatcttaaaaactaaatatttagaaactgatgtaactagttataaaaccataattatataagagagtattcttttataacaagaagtcttcacacctgtcatccagtgttttaatgcctatagtacttattagctgactatttctattattaccattttacaagcaagtgccattcttgaaactgattgatgtttaggaataaagcacatttattacatgttgccaacttcagaagagcaatcttataacctacagcgctttttgagaagtgatgataccttatatttctggaactaatcactgctaaagaaagtaaaaaggtgaaaacataattttttttcttgtgaagacctttcattgcattatatgccattcaactataaagtgattatagtgttttatctgccaagaatgacagtggtgaaaggtaactttatgtatatatgtaaagagatgtgtacatatctatctatgtcaaccattgcccatatcatcttccaatttcagtctggctagtctgacttgtacagatatagaagaaggatgaaaattgaaagcaagaaatgaaattcttgttgtatgtaatcaaaatttgtgatgttactataattgttttattatttcactgcttcttccaaatcattattgtacagttttcactcaccagtctttgaagttcttgcctccattataccatcttgaccttatacactgactttgcctcccattatgccacctgatctcatctgctaatcctaagtcactgcccaaccttgattgaatactttgatccttggccactggtctttcaatttctgcctgtggtaccagctacttaggaggctgaggcaggaggggcacttgaggaggggttcgagtctgcaatgagctattgatcacaccactgtactccagcctgggtgaaagagcaagactctgactcaaaaataataatatttttaatcggtaaattccagtttgtggttgctgttaagagaggaaaggagaatgtataccaagctttttatgatcctaaagttcatacacagttttcaattgaataacattttagcaaactctttctagtagtcagcattgtcacaatctctttgagctctaggatcctatttataaataaggcatttatagaatcccagttttacagtactggagataccatgcatggcaaaccaaaacataagtaataggttatatttcatgtttttaagtagctcagctgttttccatccagttagcctcaggtatttacccaaactcaaatttgttatcctctaaatactttaaaaattatcacagtaaatggcattaacctgagtcctcttgacactgttgacccttttactctgcatttctaattagtcacaaggttttatatagtccatctccgaatgtgaatgaaatcttttatgtcattttctatcttatataggcttgacttagtccaagcccttgtgtttatagacaattcttaaatgaccatctgctaatcactttcactttcttgtccttctggtccttatgcaacaccaccatcatatacaaagtccaaaatacaatcttatctggtaactaccttgctcaaaattctcagaggccctctcacttctgtaagaaactgtccagaatgctgaatgcagagtataggacccttcacaaacaggcctcattgcatctctgccttagtttgagttcttacaaaagcaaagcctgaagacaaggacttggatgaaagtggcctatttgggagttgatcttgggaaatagacatcagggaggaggaaatatgagacaaagaaggagcaaaagtcaacttaagcaggtatcacttttagatcacaattatgaactcctagaaagtgtgcagaagccttatagaattgtccccctgaaggatggaaggcgggagcagcctaagggctgtccctgaaagtatttattcacttgcctgtacttttgtggcttggaagcacaggcttagtaggctcttgtggtggcaggagaggccctgggacagggggtacaaagaagtttagcaaagcatgaagtggggctctgttttcttggggtcagtcagagctgacatggaactgactagaagagctgctgttgaattagaggtggtcaaggaggctgtagtgtgtgtcccagaaatatctgccccactctccatctagccttgtctccttcctctccctcctaatccatctttactctaggccctacgacacacctaacattccagccagatctgtatccttttgctcatgccgttatctgtgattccctccattccttctctgcattcaaaatgctagttatcctttaagacatagttcatatttcatcttcaagtaaagatgacccaactagacaaagtacaatacacttttctctgatttgtcatgatcattttctaaggtttactggagtcattaacatacattataataagttatttatatattcatttagctagagtgtacatttcttaaagacagggataatgtctaactcctatttatgtcaccagctccaaacataatagctgcttcatagctggcattcaataaatgtctacttatttaatgaatgaaaatatttggtttttaatgtctagtttaaatttgtataaaaattaattttaaatttagaattttttcaaattgatggtatgaaactttttttaaattgaaaaaatagctgggaagatatacttgtaccatatatatacacatatacatacacaaatatatatatacgtatacatatatacacacacatatacatatgcacactatatagagatatggtatatgtatatttacataactcacgtgctctctctctctttctctctctctatatatatatatatatacgtatgtatatgtacttttactttagtaccagtagtaaatatcaaaatatgctctcagaaaatacatttcaggtgtcacttataaaaatataggtctcatttatgtagtataaatacatctgaatgttttactagttggagtagtttggattctaataacaagatatcaaatatagagattttataaataggtgagtatatagtatattttcatattatccaacctattatttttttaattatgtcacttttttgttgagtacattccataattttataataatttagttttcttctttcaaatgccaaatgttctaatcaaaaaaactcagaatttttctttccattgtggtatgttaaaagcacattgttttttgtatgtcacagtgcactgagtcttctgatttctttttaccaatttttggctttgtgatttccaaaggaacttgttggtaatcattgcgtagtgtgaagtgggaaggtgggtgggcagaggaagggtgtagatattttaaagtctggtttgtggacaaggatatgtattacagatagactacatgattttacatcatatgttccaactattgacagatttataaaattataaagactgagggactttaagcaatccacacttaattttgttcttagtgctaaggtgtctgaggagaggggagaggtaaggtaaagatgggagataaaggaaagaagagatgttagagaaataagaggaagtgtattagtctgttctcacactgctaataaagatatacctgagactggataatttatacaggaaagaggtttaatggactcacagttccacatggctggggaggcctcacaatcatggtggaaggcaaggaggagcaagtcacatcttaacgtggataacagcaggcaaagagagagcttatgcagggaaactcctccttatgaaaccatcagatctcatgagacttattcattatcatgagaagagcatgagaaagacacacccccatgattcagttacctcccaccgggtccctcccacaacacatgggaattgtggaagctacaattcaagatgaaatttgaggggggacacagccaaaccatatcaagagggaaatataaaagaaagagagaaggaaggatgaggaagggagggagagagaagcttgggagctatacagcattgtttcagaatataaagactgctattattgggtatgcttaacaatggaaatgttttactagcgcttttattagcgggcaataaaagacatcctggagggaaataattcagtcactgtcagacgttcccacttcaaccataggccttcaacttttggtaggaacataaagtcttaaaataggcaaaactgaaagctgtcataatcaactatcatcagtcatcagtcaatactaatttcttatagaaatagcattaattcttttcatctaggagatcttgtttataaaggagagaaattgtcacccatttgggctagccctgcccgaaaatgaaatgatgaacttgacttctcaagcccacatgacttctagagcatgagatagtctgctgttctgctgctgaaagtcagcaacctagcatagggataaggaacgtggactctggcgctaactgcttggggtaaaatcctggtgccaccacttaccagtttcccctggttagattactcagccactctagatttgttttcccatctgaaaaaaaaaaacggcaaaaataaaaatacctacccctctgtattagtctgttttcatattgctgataaagacatacccaagattggacaatttacaaaagaaggaggtttaatggacttacagttccacatggctggggaagcctcacaatcatgacagaaggcaaagaggagcaagtcacaacttacatgaatggcagcaggcaaagagagagaacttgtgcaggggaactcctctttataaaaccatcagatctcatgagacttactatcatgagaatagcagggaaagacctgcccacatgatttaattacctcccactgggtccctcccacaacatgtgggaatacaagatgaaatttgggtgggaacacagctaaaccatatcaccctcctaaacactgtgaagattaaattacttaatatttgtataacacttacactagagcttgtcatataggaagtgctgtataagtgtatgcacttatgcttatgaaactgggcctttgtccctgaagctttgctccctgaagactttgattacatgagccttctctaataagtggggacataaaataaaacatatattatctttgcagaaacacctcaaacagtgcatttcattcataatttgatactcaggcatgccctaaactctcagaatgacttaagataaacgtgatgtctaaatgaagccaatgtaggtggtgatgatgaacagtttaccacaaccacagagcttttaccaggtgttaagcatcaaacctcctcttccaccttctgatctgaacttccacataccaaagctctagcatcaaaacttcggttttatcttctgcgtcttggcctcttgacatacacttagcaagtgagatcttttcttcttgttttgggtaagtcttctgaagtagggagtgttgaaataaatggcttatgacatgtatagtgttgaaataaacgtttattttaacacttcataagtcatgagccatttattttaacagttttcacttgaagtttttaaataataggttttatacagggatgtgtcatccactctgtttaatgtaaaagtgaatatgtaaatacatccatctatctaatctggattttacaccctttggctgccaaacagcctggttgccatagtttctggagtaacctgaaattaaattttcttctctttctctttctgttgataggtaatttgatggtacataaggtgattggacatcactccattaatggacaaatggttaaatacagtttttttttcagaaatctaaaaaagtgtcagcaaagaccagagttgacagttaaatgctttcgtaactagaacagcttttactagaaaatgtcaggatttttcctttcgtttttagaattaatagcaacttgttgcagggttatttttgagcattcatacaaataagtatatatataaaaagtatatgtacagtgcaatgcctagagccaataggtacatacaaatatcaacttattgaaggaaggcaaaatgtttgtgaaaaacggccctagtttgggagtcaacatatttgggtagaatctgagaccttccagttactcttataaagacaagatatttaacaatttttagcataaaaagtgatagctcctggagattctgtgagatttagataaagtaacttaagtaatattaataaaagccttaatagagttctgtgtgcatatttagttcattcaacaaaggatagttattgttattgctattattccttgctaggaaatggcaattaattaaaatagctatgaatgttatatttttaagaattattttcaatattcacaagtttgtgtccttgtttttcccaaataatataggtaaactgatatttttataagagcaagaagaatccaagtgttatataggggaaacttttaaaaataaaggtttattttttaatgattttagacttacagaaaagttgaaaagatagtggagagaatccctatatacttctcatccaatttaccctgtctctaattacaaggagtattttaagaatttgtcaaagtaataccttgtgttggaaagtttttgtgccaaaaccggaatttaaatgctaatagtgatgggaaatgaatggaacaaaaacattgtgagatggaggatgagaatggcacaagggaacgatgccacgagaagggaaattaaagggaaacacttagcaaaaccttagctctcacaaagacttctcatttttccatacataaaacaataccctcacatatctaagtttattgaaagagttagttgagacatgaaagggaaatgtttgcttttgctttcagatactaaaaaatcttttaaagaataattaaaagctgagaagtaaaaatgctccagaaagaatacaaatactggcattcgttttccatttgacattttccaatgtctataaatgctattgatttcaaattctaaattatttcacttctgaacacgccttgtaggattattacagtgctatttgtgtgggcttgtaatcattgattgtgacattatactctccataaatgtgccattgtgaataattaaacttgttagtattttgtttgcctacagcctttagagtgatagcccgttttttggcaatcataatatgtttctctagttcagtttgtgctggatatgggaaatacatcatttttttctgaaactttttcaatacatttccattttcaaattttaaattttaagaactgcttcataatatattcagcatttagtaaattagaattctgggagtcttatgatttgtatttcgaagtttatgaataaataatcttctagagtgaaagcagatctttttcataccagttactacctgtgaaaacacttgcctagagtaaaacaaatattagtgttccaaaaatatatacattgtgaccattggccctatttacactggattgcaaatatacttgaaaaaatttgaaagtgttatagtttaatatgatttctgttgacttctacacaattacaatgagtctctgagctctgttgagaaaaacagtatatagcggttttggcaaaggttactgaaaaatgtctctcccctcaaggcatggaaaccatgctctagctctgcctctgtaactagatttaacatatctgtgatgcccaatgcccaaatctgaatggtcgaatgctgtttggaattattatacacaatttaagcatttggacgatgagacacttatgtcaacaatataaattggaaaaaaacaagaaagagcatctacgaatgtggaaaaatatatgcatcacattttgcttagatatgtgcattagacacagactatatatcctttccccaccaagttggtcctgacaataggctgtctcctcttcttgcaaatggaagttagctaactgccatttggcaataagttgagtcatccagggttgcacactggccaatttgcctgcatatccatgccagtagacaaagtaatgacctcaatttgacaagagcctgaaatttcatcagaaaacattaaagattgaaaaaatagcaaatagagaaaggatacttcattacaaatccaccatagacttgacataactatgagccaaatattccttaaagatttgtctgggaagttaagtttatgactacaaggttttaataggaataacacccttgagtgactcctctctcgttttggagaggtaaagatatactcaaataccaatttgggcataaagtgcagaaacagacattctcattatatgttaacaatacttgtgatcagttgatggcattttttgaaatttggctctggggtctcacttagcactacagtcagcaaagggccaaactgcttctttggttcattgaagctgtgcctttctaaatagagtgatttttagcatgcctggctaattcaagagttacgatttagaggtatagtctagccgtaatacctgtctttatatgctcatcattttgtactccatgtgtccttattcttagtaactagtgatttatcactgacaatgtgtgtgtgtgtatgtgtatgtttgtgtgtacgtgcttatatgtgatatatgtggcttctttaaaagcattgctctcaagaaaatttcatggagattacgaacattaacaagagcaacaccaccataaaaattgctctcactgggtcatctaagttgacattgatttaccttacatgatgtactgtagatgatgatcttcagtcccattcacctttaaaatataagctcacagattcattttttttctttttttctttcttttttttttttttttttttttagacagagtttcactcttgttggccaggctggagtgcaatggcgcaatctcggctcactgcaacctccgcctcccagattcaagcgattctcctgcctcagccttccaagttgctggagaggcgcctgccaccatgaccaactgattttgtatttttactggagatgggttttcaccatgtcggccaggctggtctcgaactcctgacctcaggtcatccacctgccttggcctccccaagtgctggaattacagacatgagccaccgtgccctgccacagattcattttctatttgcaaatgggaagatgtcctcatatttcataaaattaagtatttgaaagattctgaccatcaaaagaattttttagaagtggattcatataggagatgctcacttttgagatggacattttgctacttcttatttatgtattcatatatttttatttttaatggagtatagttaaatacaatataatacacagatatgatatatgttcagataagttagctttcaaaatgatgcacatctgtagtaacacaatctgaaacaagacagaggatatttccttcacaccagaaagttctcttgggttgcttgctagtcaatttctccatctccagctgagacttataccaccatagactctttttatctgtactaaaacttcatataaactaaataatattcattctattctctctttctctttcttacctttcttccctgctacttccatgtgtgtgtgagtaggggacatgtctggcctcatttacgttcaatataatttttaaaataatattgtcacatacatcagtagaaatttcatttttattgctagtagtttacattctactgattgaccaaaatgtgtttattcattctccaattgatggatatttcagttgtttccagttttgagctgttatgggtaaggctgtcatgaacatttttgtacatatacttttttagttctgttttcactgttgagtgaatatctaggaaagaaattgctgggtgataggatagatgtatgtcattttttaaagaaactgtcaaacaattatccaaagtgatttatctttatttatttatttatttttattttttatttttttgagatggagtcttgcattgttgcctgggctggggtgcaatggcgtgatctcggctcactgcaacctccgtctcccatgttcacgcgattctcctgcctcagcttcctgagtagctgggattacaggcacacaccaccacacccggcttattttttgtgtttttatagagacagggtttcactatgttggccagactgttctccaactcctgacctcgtgatccgcccgccttggcctcccaaagtgctgggattacaggcgtgagccaccatgcctggccgtgatttatcattttatactccttccagcagcatgtgagagttcgttttgttccacattgttatcaacatttggtgttatcagtcttttggatttttagccattcctgtgggcctaaaatggtgtctcatggtgattttaatttcgagttccctgatgtggaacacttttttatgtatttattgatcatttgtatgtctttttaaaaagtattgttcaagtattttgtctattgtaatcttttaactgttggtttctagttcttcatgtattttacatatgagttcgttttaaaatatatgtgtgtgaatatatttttttctagactttggcttctttattttcttaatgatgtattttgttcaagtgtccagtttatcaattttttttttaaattagtcgttgcttttaacatcctttccatgaaatttttgcctaattcagggttacagaaatattctccttttcttctccctaggaactttatggtttcaagttttacatttagatttacaattcatcttgaatctttaaaaaaactgtatatgaagtgaggtagaggccatggtttcatttttttcctttcttttcttttcttttctccccccttcctcttaaaaatatcctgcttttctcacaccatttgttagaatggcttttttcccctcattgaactgacttcctgccttggtcaaaaattaattggccttacctgtgggactatatcaggactccgttctctttcacttatttgtcgtatattctaatgccattgtctttattactataaatttaaagcaagtcctaaaatgaaatcgtgtccttgagttattttctttcctgattgtttttgctaatctacatcctttgtatttttaaataatgttaagaatcagcttatcagtttcttcaaagaaacctttttggatttttgttttgagttgtgttgaatctacagatcaatttggtgaagtttaacatcttaacagtattgagtcaacaagtctatgattagtatgtctctttattttctgaagtatcatgaatttttctcagaaatattttacaaaatatttttagtgtacagatcttacatatcttttctaaatgtactcctattgttgctttttggtgctattgtgaatactattttttaactttctaattgcttcttgtgagtatatggaatagagtatatagaaagtatgaagagtatatagagaaagaattttttaacataaagtctgattttagctataggtttttttatagatgttctttgtcagattgaggatagtctcacccttgttttgcttacagttctcatcacggatggatttcagattttcctgtgtacactttctgtacccttttgagatactcatatgtcttttctcttttattcagttgattggtgaattacattaattgattttcaaatgttaaaccatgtattagtccattttcacactgctaataaagacatacatcagactgggcaatttccaaagaaagaggtttaattggactcacagttccatgtggctggggaggccttgcaatcatggtggaaggcaaggaggagcaatcacatcttacatggatggcagcaggcaaaaagagagcttgtgcaaggcaactcctgtttttaaaaccatcagatctcattcactatcacaagaacagcgcaggaaagacccgcccccataatccaatcacctcccactgggttcctcccacaacacgtgggaagtgtgggagttaacaattcaagatgagatttgggtggggacacagccaaaccatatcaaattaccttcatattcctgggataaactgtatttgatcatgatgctttacaccttttatatattgctgaatttatttaatacagatatttgagtctatggatattggtctataattttattttcctttagtttatttgtcaggtttcaatatcaagattatactggctttataaaatgagttgagattggctcattcttcctctatcttctacaagagtttgtgtaagatcggtattattccttcctttagtttaatagaatttaccagcgaagccatctgggcttgcagtttgctttgtgaaaatgttttttattatgaattcaacttgtgcaatagttatggatctatttttaattttgactttctgttttttgttgtctcaattttggttagttgtgttttgcatggaatttgtgcatttcacttcaactgttgagtttattgtatgacattgctcatattgttctattattatccttttatatttttagaaactgtagtgatggcatttttaaagcatttactatgtgcttgtcactgtgctgcctgctttacatagattattctattttattctatttggttctgtattagatacattagaaattcatgcctactcagtggctatacaaatcactactagtttttatcatccatttggttgaggcacatcctcagcttgtagtccaaagccctgaaacatcaggggtctcaggggccacacagatatgcacagcttgaaactagcttcccatttttggcaagtagctgacttgtggtatgttaagagaggttgccagattgctccatatcctcatgctctagggtagtattacagttcctttaggtaatactttaggagatcttgtctgaaataatgtagtcttaagttctttttcctttcctagttttttgatcatatgctctttttaatacatgctacagattcctgcactatttatgatgtttgttaaaagtatagatgcatctgtgaaaatgataattcacattactggcaatagttactgaatggttgaatggagtggaacacttgttctcttccattatataagctctctatattatgaaaaagtggatcatattattctagttgtagttcttatcccttctgtttgataaaaatcctaatattacttttcatcagactagaaagaactttatgatctctagaaaggctgcagacagggacatgtataaagagtacagattctctttagtgtcccctgagaaatatttttattggcagtaaatagcaatatttattaatttattaataattaacaattgctattaaaataggaatattatttttattaacaataaatagctttgaacttcccttacttgatattttgtttaaatttaaacctgtttattcttatactaggtcaatattttttaatgcattttaaaaagtaaaatgccatatagaaattgatattggtagctgcgagagctgggggtaggctgttttcctgcctacgaggcaacatccctacactatgtaatgcactgtataccatttcccaacctgagaggctactttagttttgctgttaacgtgttttataaatatgatttgttcattactatatctgaaatttttctcaccttgttcccaaactctgccacagtttgaaatatcctaatttttagccccagacctacccacttatctttcaagagcccaactgaagtaagtcctgcatcttcctcaaagccttcctagaccacctcagatttcctggctctccttgtcttctaagtttcagcagtgtctgttgtctgacccacaaaattgggcatgtgaacatgggttgtccatgttttttatctcattgacccagccttataagcttgctgagaagagacatctcttctgctgcctttgagcaacagccatggtgctgggtacaagaaataattttgactgaaaatgatttttcattttttaccctattgaaatttaggaagaaatgttattgtcaactaattgatagagcaactaaacagtaggatctctctttttcaaagtgcctggtcagttttagagtgagcattgattcagagggttcagataagggcccaggtagagatgtccttgtccacaccacatctttgagagttgtacaggccaaagaagagaacaaaacgccatcaactgctgtacagcctgtgtttcagtagactctgagggacacagccttatcacagagcatagagattaacacatgtaattctttgtaaagtgaaagagaatgtgttgctgagagtgaaaggaatggttttacagtacagcaagtgctgccatggacaccctggccatagaaccacccacagagtaaacagagcacaggatttcagagagaaaagaaattgtgattttccaaaggaagaagtaataggatcctaatggatgtggaacctcttttttatttttctgtatgttctcagaataatgcccacttgttatcctggattctcccaagagtaaaatgaaactccggtcatcggcattatcattgtcattataatcttcctccttctcctactcaaataatcatttttgaaaacacatagaatggtgagatttttatgctgtgtaacatttgctctggacatccttaagcaaaatcacatgagaaatattacttcaagtccactaagtctgtcataggtgagaataatttcttggctggggaaatatgtcttttttaaatagttcttctatttatacttataggtaaacctttaaaattgtaggcaaaaagcattgccagaagctcttatttggagagattgaggcatgtgttaatctggaaataaagaaaagtcctcacattcaaacccggcagtgaattttatggtgatattgcagactaattgtcttattgttgtaatgcattatctaaccacacggccctgcctttcttacatgcacatactatttaattccttgagcctgaatttccatgtctgtaaaatggagataatgtatatgtgacttgtaatgatgtcgtgaggatataaataacgagtgaataatttagcagagcaactggtacttaataggttctcaagttatttcagtctaaccataaaaataatattgccactggctttgaattctaattttattttttcatatgaagtggacaccagcttaaaaattataaaggcttcaaatagttttaccactcgcaaccaagacacactgtataatcccacatcaatggatcttagtagtataaggaactgaatagcaaggaagaaactgagttagaactctggtctattttaaatgataaatactagctgcgatgtaaaaccatttgtgcgtttcctcaataactctactttgaaagtgcacaccatttttaaagtaaaagtacatttaaggttgatagtaagaaaaatttactacttgttcctgcatcaaggttttagagcaaataatacaatgaaggtattatacatattcgtagatatatatgattatagttcacaccagcctatcacataaatcaacttgtaaaactctcctttcttgtttccaaagagagtacatatgatacggcatctaccatggaaactaaaccaacttggaaatagcaataatgtccttaattcagtaattctttttcttttagctgtgtttttcctctgggtaaacctctctgcgcactggatttctttctaaatctgaatgtcctctctggccatattgaagaatgtgctcactgtactgtttcattaaactgctgtgttgtcgggtaattgtttaaacataatgccatagcactatcaaaaggaaaggtgaactaatggcatttgcaaatgtcagggattatcttaacacttttattatagtttataaaaagtaggttcagggcatttcatggcaattatttctacagaaattggttatttaaataaattgctaattatctgaagatgacagtattgaaaatgctactaatgagttgtttaataagtgtagcttgtggtggccacctacaggttgaaaatagaaagaacatacatatagactaattatgcctagtaaatgccatatatttttctctctagtgacaaatttaaagacatttagctcttcatgccatcttttgagtcttggacagtatagtgagtttctaagctcctcataaatttggttttggttctaaaacaaatttcactttgcttctgtaattgtctttgtcctattattcttggacataattatctttagttatagctagtatgattttataatttatcatctgaactgggatacttttagaccaaaggaagatagctattgttacattatgtaattacaaataaatacaggtataataaactgggactctcttgggcaaactgggctatatggttactctagttatacaattactagctattctacttctaatttaatttttatccaacaattaatataatgtctatttttctataatgttgatttttatggttttatcatacctggataatatatctttattaattataacaattattattattaactcttctttctaaagcttaatttatatccagacacttaaaatcaggaagcagcatagcattgtggttaagagcatggtgttgggagtcaggtaggcctggattcaaatactggacccatactttctaacagagtgatcttgaggatgtggcatttatccctgctgaatctcagtttacacatctataaaaatagagacagaaatatctatttcatagtaatgtgaccagcacaatgtatgcaaaaataaataggaaactatctgtcaattagaaagcactcaaaagaggagcatttatatttaacatatttaatcttaaaagttaactcatacttgcttcttttctaagttaatcactggtatctgttggaaaactatagagcatataaaattgctcttaaactaccaagaataagttatagtatccccagattttgaattggaagagaaaaactaatccaatatttcctgtagtacagagaagtctttctgttgcatcttgctgtcaagtagccatcaagattcaaggaatagggaagttccattgtagctgctttcattgctgaatttacaataaattaattataaaaataagaataataaaaccaatcgtgtatgctgaattgttcgttccaatttgctacataggataagccctttttttcatgattatccttcaaatatttgatgaccatttataggatttcttttaatcactatatagatatatatgatatgtgtgtgagaaagacagatcaagagagatcatcctattcactctgttgtgtttgtagatcttttatctaaaatattggacacagaaccaaacatgttctttgtaatgtacagaggatagaatcactgtatgtatcactcatatataaaaatgtcacatcatatatactgatgatgcttattctcgtaaggtgaattttaggaacattataaaaatagatatttttactacagaagtaaattataacaccattttatcaaaaagaatccaacaataaaaagtatatatatataaacttgaaaggtcttcaatccctttactgcaggactcaccccctttcccagagatgatacctgtgaacagtatgaaattcaacattatatgcatttacatgcacacatactaaatgtaatcacatacttttttgccaacaatgggagcataccatatatattgctctgctacttgtgattaactcttaacattataaattagagctatttgcgtgtcaattttaaaggttttctggaatatcatatcttggtgaactataatttatttaatagagtaactactcatgatcctttagattgttttctacggtttttctatagaaagtaatacttccaggaacattgttgtatatgtaactttgtgtctaagcactaatggaacagattcttcaaaaaagacttagaagatatatatatatatatatatatatatatatatatatatatatatatacacacgcacacacacgttgcaaattacacttaaaaatctaataaagatttattcacacagatacacacatttactaccatagactcaagctatgaatattcataattttgaagccaatgaaataatatatgggttacaaaaggaaccccaaatgttatatctaggaatgaatattaacaacccttaaaaattaagtgtttatccttatatgtgttatagctgaatgtttatttttctgatcaattttctctggctttgacactaatattagcttatacacattataagctaggcactgtgccaagtctttcccatgagttgtatcatctaatacatccaaactccctggaatattattagtattaatgtccttgttttttaattagggaaaaccaatgttttaggaagttgaggagcttgctcaaagctacaattgtataaagcaaatggtttgagacttacacctaattggttggacttcctctgtgttctcatagcatcagtctgtactgatactagttttcttaggcaaaaataatccagagatggttcttttggtaattgctgcattgtcacttctcaataataactgaaaatgggaactttcatgtcgcagagactttatttttaatgtattacatcctttttaaactacgtgacactggataagttatttattcagcttgagcttctcttcctttatgtacaaaatagagaggacagcacctagcttcagagttacaagggttaaagtacacagtgtacatgaagcccctgcctcagtgtctgcacgtggaaatcactctatgaatgagtgatcctactcattccagtaacagtagctgacactttcagaaaggagaatggccctctttggtgaatgttattaattctcttggtaaaaataaatgcctgacacatgctaggtactgagttatttaatatgaatccactaggaacatattgaatgcattatgaagcagaaaaacatagctatgaagataggaagacttggagaaaacataaaaaattcaactaaaattaaaacattttcagaagaaatttttagcttttctgaaaaaactaaaataacatcaaataatcaactttattttttccatttcttctctttaaattacacatctctacatataaccctagatccttttagtacttcagtttctgattgaattatgcaaatattctcagaggaccctaatccatgtgtaaagatgttatttttaaataggtgtgtcccatgtatttattagtatattaacttcattaacattgtacacttaattttagtaaagcataaatttgttggtggttcatttatatgtaggttataaaaatcaatctctcacctcctaaatccttgaaattcttgatttactaattttttttcttctggatggtgttaaaactgttaacaattagacagtcaaggttcaatttctaatgaatttgttatccacttaattcattatattttaattaatgtaagcaaattaaaactacattttctttttgcatacacagtgagcacgaatgagtattataacccaatttctgttttattgccagctagagctattatcagggagtttattgtggacttagttctaacaattaattgtgtaacagtcgctgtcctagaggagtcaaatgattagggggagaaagacaaacagaattaaactcaattattcaaaattccagttatttagcatatgttccacactctcttgctcattaaaaattccttttttcttcaaggatttagtcatgcgaagtacatctctgcctccttttcaccaataaacttgagttcagatattgtaattaaaatccatggacattttgcttctcaaaaaaaaaaaatcttaaatatattgatgtcagccttttgaggctttttttcctttggggtcaaagtaatcttcatcaacattatgacactgctaaatgacagctgttaggaaaagagaaaaaggaggggacatgtatggtcctcttaaggtttcagaggataaagttctgtcatcataggcatcatgcttttgtctccaatttaaaaattggttttaattgcatcactaaacacacaagaacatagaaggcaatgtcaaagtaaactacataaatgctcactctgaaatcaattgtccttgagggcagtacaaattataacagcaaacacttctacaatttttattatgtcctcgccttttatatatattatgtaatttattcttcaaaacagctctatgaagacgttattacaatttttattattttatagatgacaaaattgagattcggtgggatttaaaaattttcacaaagtcacacagcttataaatggaactaagatttgaacctcaacagttggcccagttgtctctctgatgttggtaactagttcatcctcaaattgccttcttgatagaattcatattaatagtatttataaaatgtataatgttctaacaaatgtgaattgtttctaatggaatactggtagagaatgaataactggattcaaattattaacttgaaataacctactacaatgataagacctggtgttttgtgagtcaagcgtagatatatagttaggacacaaactgatgaaccaggaaaaaaaaagccataggtgcttaaaaaatattttgtggatagacagatgaatggataaatgaagactgagtaaggaacctgattgtcataatacattaatacacatatatcaatatataatattatagccaatgatagcatttctgaaattgtatttaaaatgatatctgacaaatgagagttcattttcttaagaaaaatacttttcatcaaaatcagattgattaacttaattcaaaatctctggcttactaaaatgtttttctgaaacatgaatcaattcaagaatgttctgtgtagtttatctaagacaatctatgaattcaacacactgatttgtattttaaattatgactacatggagggcctagaatgattattgaccaaaagttacagttcagtctagtccaccacaagagccacataatgcaaagcaaagttcttggtagcaatgttgcaactcataagtccagttcatttttcgtttgtttgttcgaacctgcagcttgtttcaaaacgtgggaactcagaatggcttgatttttattggaggattccacacagttgaagcagaatggcttgatgtaactgaattccccattaggttcatctggccaccccatgtagatgagggcttaatttaaattgcatgttacctgttagttcaattaagtgtataggatttcaatttcttgatttaaaccttgttgtttccttaaagatagagcccgcatacacattctttgaacttctcacactggcttcttcctccctagtctttggtctaaaatcattaatcactgtagcagtgacaaaattttaaaagacctttatctcgataattgtaattcaggaagtctttatgattttaattggcatatgtacaattttgtatggcattgatatatgtattttctttaaaccaacagttttatttttatcttgaacctattattacttcatttctgtcattttaaaactaaaaataaattctacatagcaatttagaaagatctttttatataccttcattttccttctagaaaccgttcttagtggatgaagtcattcttaagaactattccccataaaaatgctgagaacaggtagattatattttgtattaaatcagttgagttataaaaaatcaaactgggtttataatggaaataaaaactgaatttactgtagtccagcaacagagagatcatttcttcattttttggatctcatttcctcagagaacatagttactcttaacttgaaaaaatactcttattttttgaaaagattttctgttcattaggtacattataaaagcgttagaaaggaagaaaagcataaattggaaaatgtcttattgacctaattgaacatcttcaaatgccaataagaatttgctgatttttttaacacctgtgtaataatgttgccctttaagtgtcactggttaatttttcaaagctgtgttgcctttttatgtccattaatatcaatagaatatgtggccaaatccctgtataccactttgaaattttaccccttactgttaatgatagtcttctaacagtggaggtagaaataaattatttatctacttagctcaaatttactctcttgggtcaactaaataagggaggaaaaaaaccaatatttctttattacttcaaagtagtgtgtatgtaaagaagccattgggttggtatgtattggctatgccagttatattatgcagagatagctgtgtgtctatcaaaaagtttgttacagctttccttaaaaaatgctttcctttaacttttgttatgtagatttcttttagtataactgaagatatgtgtatatatatgtgtgtttttgtattctcactataaattctgtccactattagcctttttatggttaaaacataaaaactgtgaggaatcactgataaataatatagaagtagaatcttaatgtccggtttctaatttgcccaacttaatactttgtatccaaaatgtctattatgaattttgaagtgtcagcattgaatattcctaactaaggaatgctatagtaatatgtagaggaagatgtttgaggtgtgggagccacaagtagacatttccacaaacatttttgtgttgagtacaaaagcagtagtcatgcaaacgttcaattttatctgaaacagatatgaacaggataaaaagaaagccaccgatttttttttttttttttttttttttttttttgagacagaatcttgctcttgttgcccaggctggagggcaatggcgcaatctcggctcactgcagcctccacctcctgggttccagcaattctcctgcctcagcctcctgggtagctgggattacaggcgcccgccaccaagtccagataatttttgtatttgtttgtagacacggggttttaccatgttggccaggctggtctcaaactgttggccaggctggtctcaaacttctgacctcaggtgatccctctgcctcggcctcccaaagtgctaggattataggcgtgagccaccactcccagcctctgttttagactttattttttagagcagtttagattcacagcaaaattgagaggaagatacagagatactcaatatatccactgctccaacacatgcatgacctccctcattatcaacattccccactagagtgatacatttgttgtaatccatgaacgtgcattgacacctatagcctaaccacccaaagtccgaactttacaataggtttcacacttggtgttgggcattctatgagtgtaacagatacattctctaagtgtgttttgtgtgtgtgtgtgtaaatgtataacaacatgcatccaccattatagtatatatagtattttcactgtcctaaaaatcctctttgctctgcctatttatccctcccgttcgctccttactaccactgatattttcactgtctccacagtttttccttttccagaatgtcatatagttggaatcatatgctatctagccttttcaaattgaaagccctttaactttttgtttcttttcttatttaattattttattttattttttaatttaatttaattttaagttctggccattttttaaaggaaggctgtgtgtgctacctcagagtaagcactccagtaaatacatattgatattgctggtgactagtggtggtggaggtgatgacaaagaactcaccacgtgaggctgaaccagttatttgtttatgttgtttgtgaagccctggtttaaggcagtgtcaaattcttgcataagttgaactgcctttagttcagaaaatgcttaaaggacccctgacttataagggaacaccaggaatatcaaattatattcctttattatgaaagcattaatgtactctgggatgtttaacatttgagaattcaaagtagctttagtacaatatactcatttttaaaatagccccaaagtattctttctatccatacaatttttattactattagggaataatatactggtaatgtctggctaattaaatattaaaaaattaaattcatacactctaattactggattctagtaaattctctttaacttgattaaaactttctaatatgtgaaaaattggattagactccctattttttttcaaattgtgggaagtacatataaaaagcaacatggaatctgtaagttcatcagcaccttgcctttttttacagagtctatgttcgcaacatctgctttgtactctaaagaaacataacatagctgtatgtctactgatgtactatatgggattgtttttcttttcaaaatctgctgttccttgttttttgtttgtttgtttgtttttgagacagagtctcactctgtcacccaggctggagtgcaatggtgtgatctcggctcactgcaacctccgcctcgtggattcaagcagttttcctgcctcagcctcccaagtagctgggattacaggagcctgccaccacgcctggttaatgtttatttttgtatttttagtagccatgggatttcaccatgttggccaggctagtctcaaactcctgacctcaggtgatccacccacctcggcctcccaaagtgctaggattacaggcgtgagccactgatgctcaaatattctatgcaatcttttacacattactgtatatccaattgtaatatgcatgtaatatgtgtgcacagagaattctgtgtttgctatacctacttgtataacatgtctaaattcaatattggtatcaaagtccttaaaataaataaacatccattaacaaattaacatgctttaaaacataacatttatacactacatatgtatatacatcttaaacagagataaagtaatttgaaatttgtccagtgacgctgtcatcacatcatagtaatagaagtaatataagacagtatactcaagtggtcagtgtgctaaccattgattattctgattttgtgtagggacagcaatcagacctattgctttgagagctgtgacctccattgctcgtgctctgcctggatttcccattttggctactggtggaattgactctgctgaaagtggtcttcagtttctccatagtggtgcttccgtcctccaggtagtcattgtgtttgtctgtcccttttaaaaatctccatctcacaaatgcaatgtaagttatgtgacaaaaaaaaaatagattcgtttttgggcctcttgaaaaggaggccatttgggatcaaaatggcagcatgtattaagttcctctgacaagttatgaagagacctgaggtttatttcctgtcctgttgagggcttacgaacccactgtcttttcttaatacatttattcacccatgtgatcctgaaataaataagatcaggtaccaaaatgagtactgtcctcctggaaaaacaatacatgaggaaatctgagtaaaagtaaaatctcaattgaaaaacaaaatgaaatcaagggtatgaaaatctatgtcattaccaaatttgatcctgagattcctggcagccaaagaaataaattattagctttataacttttaaaatattaaaataaattgattgttcagcttcttgtggtacaaagctgagggaacttctttcttcccttgtcctcttaaagggatgctgtgagatgtagtgaattgtactcttaataatacccctaaaataataaaaattagaacattaaaaagtattcatatactttttaaaaataatgttgctcaacatgggcttagtactgtcagcacattttagcataagaatttctcattcaggttttgtagtctgaattgacctagggaccaagctttttatatgactagactgtgaactgtgaactctctggtaatactccattaataatgacttctcactacttagcattgatggtaattggaaagcagaaagtttggcatcacatattctctggcaaaagggtagagtgtaaatagttcatgttgctaacttgacaatcagaattaacattgttctatgaaatacctacaatctatggtggaaataatatgtattagaaagctaatggaggcagacttctgcttccaagaagatggaatagatttacttttctctgtgcctcccactgtatacagctaaaaacccttatatgtaaaactgatgatataagaagactgaaaggtgaagagaaggcagattggctagggatctcaagacccgagaaacaacacagtggtgagtttcctgcgatttttttcctcacatatctcatctcacacttggagccaaagaagctcaacagcccagaaacaacaataggcacagatgaaaagcctgctctctctagccaaagaaccaggaaaggggcagtctagcaagagagagaacttttagacataacttccctgctccacccaacaccacggataaatattccatccctacacccatccatgcaagcaaaggacaagtagggatcttagacgtccaccctcaccaagcagtctcacatccccactgggcaaaaatgagccctcacccccatcccatatcagaagcctggacttctaccctcacctgagagtaatgaggtgtccgtcctccccccttctgcagtagtagtagaggaggtctagtgcagagtcaggaccttcatcatcaccgtgtggtaataaggccactctcctttcctccttcttatggtgtcagtgaaggccaagtagggagcagcaacaaggcgtgcctgcatctcttagccagggatgtgtcagtgcaggcttactggagagccagaattctcacctcctcccagcagtaaccaggagccatgcccctcgggtgtccaagaaagccaagtaagatacctgggcttctatctggcattaaggaggtggcattctccacttcccctgccagactgacaccaaggaaagctagcagaaacaaagtttaaataaaatcaagagtctcttaatattataccaaaattgtcaagatttcaattaaaaattactcatgataccaagacccaggaaaacctcaggctggatcataaaaaagaattgatagatgcccacattaacatgacagagatactataattatctgtcagatattttaagcctccattataaaattgcattaacaagcaactacaagtatgattgaaacaaatgaaacaacagaaagtctcatcaaagaaatagaagatataaagatgaaaattttggacttaaaaatgcaatcacttaaatataaaactcagctgatgtgctcaatagtaaaataagagaacagaagaaaaaatcagtgaactagaagatagagcaatagaaattggcaatagaaattggccaatatgaaaaacagagagaaaaaaagactgaagaaaagaatgaaaacagccctcagggaactgtgggactataacaaaagatgtaacactaatgtcctcagagtcccagaggagaggtgaaaaaggcaggaatggaaaaaaaataatggctaaaaatattccaatttttgcaaaagacataaacctgtagattcaagaggtcaaggtagacttccaaagagggcagcttcaaagaaatccataccaaaatccatcatattcaaatttctgaaaactgaagaaaaagataaaacctcgataacagcaagaggaagatgacaccttacttattggggacaaacaattctaataacaggggatttctcatcacaagccatggagtctggaagaaagtgggacatttttcaaatgctaaaacaagaactgtcagctcaaaatcctgtatccttcagaaatgagccagaaatcaagacattctcggctgaagaaaaactaagagaatgtattgccaggaatccttaaccaaaagaatggctaaagaaagctttttcagaagaaagaaaatgataaaagaaggcaccttaggatatcaagaagaaaggaagaatatggagcagtgtcttcaaaaagaatctggaagataacagtatccaggcttgagtatcacctgaatttattttcatccacatgtagaaatacctgagctgaaggatacaatggagttatgagtgggtttcagaagagactcttgctcattgtcagatgtgaccatgggcaagtcacacatggaagtaaagattattgactgtctaccatgtgctggtagtaattgctgctacatatagtatttccacaacctacttgagagtgaaatttttaaatatttttttttattgacatcaactaaggcttggaggataaaagtgattgatatggcttggctctgtgtgagattacaattcaaatctcaccttgaattgtaataatccccatatgttgtgggagggacctggtgggaggtagttaaatcatgggggcaggtctttcctgtgctttcctgacagtgagtaagtctcactagatctggtggttttataaaggggagttcccctgcacatgctctcttgcctgccgccatgtaagacgagactttgctcaccatttgccttccacatgattgtgaggcttccccagccatgtggaactgtgagtcaattagacctctttcctttataaattacccagtcttaggtgtgtctttaatagcagtcacatgactagcaatggagccagaattcccatctagagtttcacagccacaaagcaaatactcttccaactgggcatattgcctgtcttccatcacaggacctgtaagacgggaatattagtaatacgcaagtcttccatgcccactcaaagcttacatgttcaggctatagcttacctcttagagtcaagtttctatgaagagaagaaaagtgaaatcatagaaaactaaacgagagttatgtgtcctgggtgtagatgtgtgctcagggtgcagatcctagtatgtaaatatacatagagtactatgtgtcctcatagaaatgaatggtgaaataattattcaaatgtcagtttctacttaggctcctcttagatggaaaatcagaaactcactgactatgcacatgaagcctattgtattctggacatgaaaggaccctggaactggaactgcaagaaccagtgggacagtcctggggcaagacctttgccatctctcttttgtgagccatgtgatttcttcttcagaagaaactaaatttctgtccactcttgttctctccatggcttactcttgcctcctctgaacttctatcacatggctgtcatgacccttagacccacgccacattgcagccttttagctctcatttctccatgaaatgtcccaatagcttactgtctattggcttggatttctttttttaaacttttattttaagttcagggtacgtgtgcaggtttgctacataggtaaacttttttcatgtggtttgttatagagattattttatcacccaagtattaagcctagtactcattatttttcttgatcctctccctcctcccatccttcaccctctcataggccccagtgtgtgtcattcccctctatgtgttcatgtgttctcataatttagtttccacttctaagtgagaacatgcagtatttggttgtccgttcctgtattaccttgctaaggataatggcctccagctccctccaggtccctgcaaatgacatgatctcattcctttttatggctgaatagtattccatggtgtacatgtaccacattttctttatccagtctatcattgatgggaatttaggttgattccatgtctttgctattgtgaatagtgctgcagtgaacatacatatgcatgtgtctttataatgggatgatttatattcctttgtgtacagctcagactgctaagagaggaaatctgtttgcctaaatttatctttttatgccaggccccatcataagctattggttaccccatgtattgactgcttggtgtgtaacagaaatatagtaaattttggttgaatgagtttgttaaatgaatgtgcttggttatgggttttttgttttgttttgtttttaccagaattgtgaagaggggatacaaggattcacatggtataaaagaaatcattatctctttagctctagctgggaatagcccagagactttctggctattaaaatattggttcccaaatgattttgttaaaaatgtaaagtttcacacataggtttttacttcagaaatgaagaggaaatcaagacaatttcagctaaaaaatacctaggagaatttattgcccagagagctggcaatctaatctgtagaaatttaaagattatttttcagctctgccattagcttgagtcagatttttaactcagccagaacatgtttttttaaccaatattagctaaagtatgaattaaaatcagtatatatatatatatatatatatatatatatatatatatatatacttaggatggtcataaggtgggaaatatttgaatttataattttagtttggtagttcagtggagggtagagaatatatatttccatctttcttccattctaactgaatttcacttcattccactccctaatcttgggttaacctaacctttcgttcagtatagttttaagctgttgaatattattagagaaattaatgtaactctgcaattgggcttactccaaatacatagtgtttaatgtctgctggggcttgggtactagtcagtatttctttttattcgtctttttttttttttacttcccatcaaattcttttttttttttcttttttttttttttttgagaaggagtctcgcactgttgcccaggctggagtgcagtgacgcaatctcagctcacagcaagctccgcctcccgggttcacaccattctcctgcctcagcctcccaagtagctgggaccacaggtgcccgccaccatgcccggctaatttttttgtgtgtgtatttttagtagagacagggtttcactatgttagccaggatggtctcaatctcctgacctcgtgatccgcccacctcggcctcccaaagtgctgggattacagacaggcatgagccaccgcacccagcctcaaattctttcttgcagttagttcgaatctttttcatacagctcaaagcccttagcctcttgatcatcatcctcccatttctctcatatcatcctttcattgcctctcattgcccaaccgaattctgttctctggttttacaatatttattaaatccacctttctaatgatttctattcacaagtgaaatgtgtaccaacaaaatgaattctttatagcaggtataaccagacaaatgaaattgatttaaatatctaggttatggtgctgatacactagagtatagaaatagaagtcctgtaatgggtgtagaaatagtaatataaataaatattttgattctgatttttctcatacactattcatcatgtgtatagactatgtagataagtgagtgccctactaaaattaagatttacactcaaattagtaatttcaaaatcttatgtaattaagtgagttcactgctaaaataaagatttacactcaaattagtaatttcaaaatctgttccaaatgaatctatgtttgtaaattaagccatatgactgacattaagaagagtaatgacatttcaagaatggaaagctaatttttttcataagttgcataagtgtgatagcgcataccttctttattgctttatatgcatcacagagaataattcattcattcattttttaataaatatgtattgagaccctactatatattcttagcattgttgtagaaatttagagtatttctgtgaattaaaaaaaaaaacaactaaagtctgttaccttattgggcttacattcttgtgagcagagacagaaaaatatacaataaatgttaaatgtaagtgtattatatttaacataagataagtgctgtgggaaaaaaacagacttcattgtaaagataatatttttattaaaaaatgatggttgtaaatcctagaaaatttttattgaagaaaaaacctaggttacagcatcatttgcttaaatttttgctaattgaggaattaaatgtaagttcacaaaatattgtatatcacctcacagtttatttttatttatttattttcatatgtataatcaaactgaaccttattatcacttgatataccaaaatacattttgcatctcaacatacttcggtatatagtgctaccttcagtggtcacatattatcccatattataaatgcactgaaatttatttataaaatccattatatgggttcttcttcactactagtttaagcagtgctgagaaaaccaaattgcatttatctctaattattttataatatattttagtataatgtaattgatcagtaaagggcatatactttttttaaacttcttaaaatttttgtgggtacatagtaggtgtacatatttataggttatgtgagctattttaatataagcatgcaatgcatagtaatcacatcagctaaatagggtccacctcacagttgataaactgaaatgtctcttagggtttcagattacattttattgggcaattattgcttttctttctttcttttttctttctttcttttttttttttttttttttttttttgagatagagtctcactctgttgccaggctggagcgcagtggccgtggcacgatctcggctcactgcaatctccacctcccagattcaagccattttcctgcctcagcctcccgagtagagctgggattacaagtgcgtgccaccacatccagctaatttttgtattttttgtaaagacggggtttcaacatgttggccaggatggtctcgatcttctgaccttgtgatccacccactcagcctcccaaaagactgggattaaaggagtgagccaccatgcccagcccaattattgcttttcatagcaaaatttgcttcaaaatttttgagcgaattttcttggaatgtatcatttctccgtggcactgtttatttctatgatcttattctgtaacatgctttgacaagatgtcaacatttcaatggtaaatcatccaatcatcttaccttaaaaaactcttcagtgattttttttatgaaaaatgccagtggaatgtttgtagggattctattgaatatttagattgctttggatagtatggatattttaacactattgattcttccagtccttgaacatagggtatcttatcacttacttgtgctttcttcaatttctttaattcatgttttataattttcagtatacaggtctttcacctccttggttaaatttatcgctaagtgtttatttttatgctactgtaagtgagattaactctttgatttcttttttggataattttttgttaatttatagaaacatcactaatttttgcatgtgaattttgtatcctgcagctttattgaatacatttattctaactgttctgttttttggtggaggcttccgagtttcctacatataatatggtatctacagagtctatttaactttttctttctgatttgggtgcttttatttctttttcttcctaattaatctggctagggcttccagtactatgtggagtaaaaatgaggagagtgggcatccttgtcttgttcttaatattagaagaaaagctttcaacttttcactattgactgtgatgttagctgcatgcttgtgatatatggcctttactgtactgaagtacattccctgtatatctaattttttgagagtttttattaagaaagatgttcaattttgtcggatgatttttctgcatctattaagattatcgtatggtttttgtgattcattctcttaatgtgttgttatatttattggtttgcataggtttaatcattctcacatctctaagatgactgctatttgatcatggtgaatgattcttttaatgtgctgttgaattcagtttgttattactttggtgaagatttttgcaaccatgtttatcagagatacggcctatactttttttcctatagtacccttttctgggtttggcttcagcgtaatactgggctcagctgaaactcaaactcaaaatgaattaaagacttaaacataagacctgaaatcataaaactcctggaagaaaacacaggggaaaagctcctagacattggccttggctatgattgtttgaataggacatcaaaggacatgcaacaaaagaaaaataaacaagtaggactacatcaaactgaaaacttctatacaaaaaaggaagcaatcaacaagatgaaaagacttcctatggatttggaaaaatattttcaaaccatatgtcttttaaggggttaatatttaaaatatataaggagctctcacaattcaaaagcaaaaaaaaaaaaaaaacaacctgatttcaaaattttttactcaggatctttgaagaaaaaaaatgtgaaatcatagaaaaatgaatgagagttatgtgtcttgagtgtagacgttaatattctttgaataaagaacccgagtaaatatctttgagtaaagaacctgagtaaataatggaccaaaggagacataaatggcacagatatttgaatagatgcttaacatcactgatcttcaggaaaatgcaaatcaaaactacaatgagatattatcttacacctgttagaataactattatcaaacaagataaaaatagcaaatgttgatgagggtgtaaagaaagggcaacttttgttcattgttggggaaaatgtaaattggtgcagccattatggaaaacaatatggaggttcctcaaaaaattaaaaacagaactacgatgtgacctagcgatccttcttctgggtaaatccccaaaggaaatgaaatcagcactacatatagatagatgatagacagatagatagatagatagatagatagatagatagatagatagatagatagatagacagacagacagatagttagatagatctgtactcccatattctgtgcagtattattcacaatagccaagatatggaagcaaccttaagtgtctatcaatagatgaatgatgaagaaattgcagcatatatacgcaatggagttttgttcagctgtaaaaaagatcctgccatttgtgtcaaaataaatgaacctagagaatactatgccaaatgaaataagccaaacacagaaaggaaaatgttgtatgatctctcttatatgtggaatctaaaaaaaaaaaaagttgactacttagagagtagaactgtagttatcatatgtgggtgcatgaagtaggaaggttacaaagagatgcagttcaaggatacaaaattgcagtcatgtcagatgagtaagtctggagatctaaagcacagcacaagtaatctagttaataatattgtattttatactagatatttgctaagagagtagattttagacactcttaccaccagaaaaaaaatgttgctgtgtaaaatgagagatgtgttaattggcttgactgtagtgatcatttgagtgtgtatatgtataacaaaacatcatgcagtacacttaaatctgtataattttaaaatggataaaatgcttcaatgaatcctgaatataaaaactaaggaattagctagagagtaatctgggtactccagatcattttcctagtacaactttggagtgaaaatgactattacaacagaaccagatgtaacaccgtggcctagaaataagattcaaaaccgattacaggcttgccttcctgggtaaatgctcttataagttcttcagtcaacccaactgacttctaatttatttaagtgaacttcagtgtctttgaaatccctgattttttaatcttatttgacaggatttcattagttagaatatgcaaattagaaatatgaaaaggacagatgaaaattatcagtaaatttcaggtactgatatttataaaaaccttcctgttaaattatattctcaaattattcataaactcttgaggtcttgaaatctttttgagggctactctgaaaaaaagaagtttgcttctgactgccaattatttcttcatgaagagaaaaataaataaataactagtaattcaccttcaaaacagtttgaagggagaactttaataaattaacattggcttttttaagttttgatttcactgttagtcccagatcttatcttcccaatgagtcctgtatcttctttctagtattcaagtactagactataatttctgttgaaaaactatttagggatttgtattacaaccaaagctcagactgagtcagttgctttcagtgataggtttcattataaaatgttcaccttcctctatagataaaaaatatacatactatatgacttttttcactgaatgactgtaggtttctataatttaatttaatttaatgatactgccattacaattcattaccttaaggactttgattcagaaagtcaaaacttatcagttaattcacaaacaattatgacctgtgccttcattgagattgtatggatgtgtgtgtgtttgtgtgtgtgtgtgtgtgtgtgtgtgtgtgtttaattctatcttttctgcgtgggtttgtcactaaagttaatagaaaatcctgaaatataacggaaagatgaagcatagtgggcatttgctgtggaaagtcatggtcacatgacggccactcgctgaactcagataaccaaatcaatttttaacaataatcaaagctgctctgatggagctagttcaagctaaatggaattttttaatgtgatcaggaaatgtattattttattaaaattagagaaaaagaagtaattgaagcagcacgatgacactgtttccacttgagtgcagatggatgcattacccatattatctcttggtcataatatacacagaggcttcattgcttcaactttactgacgggtgtctttaggtgataaaaattttgcaccctatattacaaattttcattgggtaggtggaaaatatttattcaataacttctaattttttatttcatcatcattcagtttcaggccagagggtaacaaatgtagtaaaaatacttgacagcattcaaaattattttaaatggaatcagaactatttcacataactggttaaaagagaaatattttttctttccattatgcaatttcttgtgtcctggctttaatgaatgtttcacttacaactttaagaataatatgtaagtagatatttttaaaaatggaaactcaatattctcacaataatatataagaaaaaaatgcttttagtttatccattcaatgatgttctaattgctgtgtcagttatcacattattttaaattactttaatgaaaggttattttcaagaggttttcatatttaaaaagcatcttgattctagtgcaacaaatgttgtttataagcaaagagaataaattaaatggaaacttattacgtctttgagtgactacacattctccacttgatagaaagattaacatctagattcaagagaaattaattgaaactcaagctaatatttttgaaagacagttttactatagaaaaaaataatagcattgcacaatgactatttcaagttagagaataatcatgagttagctaagatgtttgcaggcgtatagctacagaaaattcctcaccttatataaatgtccttgcctaaattttttcttgtccctgacaaatcctttctactgtccgttcctatttgaattgtatgcagagatgtgactaattaacggtctgacttctttttcaaagagtcttcatatgcttgaccaaagtcttaaactactatttttattcttcattttgaaagaaaatctcagttgtttagatattcttatttcacatattactttctaaacattgtatatctttgttcctttcctctatttctggtttatcagtgtcacttgaaatgagttgtgattggatgggtaactgattttttaataactgtgtcttgttcatccaaatgactattagaaatagttatttggggaggtaatgtagtaactactctttatatattgggaatggatttcattcccattttaaaaagctaaagagagccaagatgaatgaacaaagttggttgttgagtgaattaggtatccaaagtcatgagtcttttttctgttagttcataaattgattttaattaccagtttacagagaaatgttccaaaattgttctgagtagtgcgaacatcttcccaggtgattattttgaaaagaccacttcattttgatgtatacactttgatatttgttttaaaattttttcaatgttttatagactttggtactaagttagagatctagaaaacctggactgtactgggaatttagagagctcttagaccatagcaaaatatattataaagagtattaatgatctattgaatattatcttctattttttcaaaaagccttttccatatgttaatttatataattcttatgaagctgtgggtatatcaataagcatttttaaccccatttatagatttgcatattcacagtttgtaatttccttgggttcattttatcagttgactttccagtaggactaggaaccatgttacctgatttctattctataatttgtctctgcatcccccaccctccctgttactgtactcaagaaatgtgctagcaaaatgaaagaggaattcaaaataataaacgtgtgaaagcttgctctttcacttattaattgctgattcttcttagttcttgagctctatctgtgagtagtttgtttatacccaatcatataattttataagtgagatatttgtttttgtctttattaagtaatttatccctgacttcttcagtttccaaaattattttgaattctgaacattctttccacgtgctgagtaaagaaaactttgagatttctagaagactggctactctggggctcctgggctctacttgggggaagcacagaaatccatttgatcacatttttggataacatgaaatttggagtaaacttggggtaaagagtaaatcacaaagtagactcagaaaaatcagaagatgcatgtgtgattgatctaatatgagaagacacagttaattagtgacaaaagtaaggttctattcttgggtacaaaaacttaagtatacatctgaagtggagacaaccatggcaaagagaagattttgtggaaaaaccatagagggatataattgacagtaagataaacagtatagcttcttttaaaaagtttatcttagttacatttgaaatgtggtatctaggaaaatgaaaataatgtcctcaatgaactatcataaaatggcatctttatcactgaatgagccccactatatcccaggcagagctcaagcatcaaggatacaaggatattctcagacacctgagacctgccctcaggaagcttgcatgctagaagctccctcacaagagtgatgtcttagtccattttctgttacttagaatactcaaagctgggcaatttttaaagaaagggaatgtatttcttacagttatggatgctgagaggtccaaggttgaggggctgcatctggtgtgagttttcttgctggcagagactctctggagagtcctgaggtggggcaggacatcacatgatgaggggcctgtgcttgctaatgcgctagttcaggtctttctttctcttcgtataaagccatgaatcccactcccatgatagtgcattaatctgtgaatggaataatccattcataagggcagagctgtcatgatccaatcacctcttacagaccccacctctcaatactgccacattggagattgagtttcaacatgagttttggaggggacattcaaaccatagcaatgataaaataattgagccattcagagaccccgagagaagagtgtcctcctggccagagaaagagcaacagtataaatatcaaggcgtagttatacaagtgagcaaatatggcctatttcaggcatggcaagacatactgaacagaggtgagaatgataggaaatgaagagaaagacataggcagagatgaatcttgtggagtacttcaggtcatgataacgattttagatgttattctgcacttgaggagtgaagtgtctccaaagagtggcaaggtctttacattttcacaggccaacaccacaccagctgtcgctttcctcagatcctggagtgaatgctcagtaggccttttctactttgtacttccatggcatcttgttcatttttaaataatggtttttatccttcataattttaattctcctctcttctagggctactttttgcctccttcacccttggttagctgcttataaataatttttactactctcaagggtgacaggccccaaaaatgtgcctttatcaactcaaattcatcacttctagaggaaacgtgtctccaaagcacatgttctgttaatggtaggacatcatcattaactttctatacaagggaaaacattattaaatattaatgcaaaaatcagactaacacacatctctttccagaatcattcagttctatcatgtgcttaatatatttaaaaattttcccaagggttcagatgagaatagattttgccactctatttatcttgcaacaaaaaatgaaaatacagaccacaaaaatacatttcacagttggtccctcaaaagcatctacctctctaagagtttccattcatgacattcagttttgtaccccactgttttgctttgtgtgtactgtcccaattctttataacttttcttcattacattttctaaataacactgaattataagcttattataaaatgaaactcatgggttatggccactctcctttttaaaggacttctctctctacctgatgattactatctttcttctaaagggttcaaaacaaatttagatttttctgggcttttttcagactggtacctttaattttttaggcacctttgccttttcaaaaggcaatttctctttgcagtactaacaaaccaaactttaaaatctcttatcctcctaacacctacactcatgtttatataggcctatttacaattagtctcatgtttggtcaccatattttcaatgtgttcacaacaaactagaccctctgatgttatcttcttctcagaaagcccactcatcacttttgatttggcatatcattattttattcttgttttccttttttccttgtgttgatgtacttctgatttcttctgagtttattgcttatggagtagatttgaaaaggtcccattcctaaccatcgtccaagattagaaaatttgaggatttatttattgactttttgggtttgatctaggatgtctaaaggctgaggcagaacagaaaagaggaaaagggaggaagacaatgttagacagtagctagacgggaatgactccagctctagaccaaaaatataaccaagctctgagaacctctgtataaaggcggatgggtagctcttattagtgagatgaaattaaagctgaattgctctaccttatacctgtatatacctaataccaagtatgtttttggtcattttttgttttttcttcataaatcagtacattcagtttcctcattcttaatgcattcatttttttctttgtgtaaatttaaggattacaagtgcagttttgttacatggattcatagtgaactctggacttttaatgtatattgtaatgtaaccctgttgttagttttaacatttttcaaaaatctcagttcatcctaagcttgaagattctttacagtatttgtgtgctatcattatgtatacagatgtggttctgttgtcatgtatactatggtagttaagagaaggagctttgaagttttataatactttgctcaacatttactagctggataaatttgggctaattatttaacctctataaaccttggtttatttatctataaaatggaagttatagtacctatctcattggattgtaataagacagaaatgatatttaatatgataaagcgagtatcacaattcagagtctcagtcctccgagtatctccctcctgctccagccaccctggtgttgccccgcttttcattatccaacaatgattggcacatcagggagccatcagcactctggtccagccctaagactgcttgtaaaatgaatatcaactgtaattgtatctgtctctagttataaactgataaaagaaagagtaccagacttatataattctagccatgcggttgacagttattacttttttttttttttggtacagataatcatgacttaggaataaaaaataagcaaacaatttgggcacacatttattttgatggtatttaattgtgactagctgcaaataatgattgtaaaagaaattacagtaaaatatcaaagttcttacaggcctgaaaacacttagaaatcacaactatgtctcttatttagaaatacagaaaatcaatgataagcttaaagtttacaaatagtagtgaaggaaattactgtcagactatctctccatttcaggtgatttctagaccacagttcagaaaccagatttaggatgaatgacctctgtctaaacagggagcatgatcaagtacaacactgaaatacaaacgtgtgttaatttccaccagatagaataattattatcaattaacgtgttttttgtttttgtttgtttgttttttgagacagagtcttgctctgtcgccgaggctggagtgcagtggcatgatctcggctcactgcaacctccgcctcccgtgttcaagcgattctcctgcctcagcctcccaagtacttgggattacaggcacccaccaccatgtccagctaatttttgtgtttttagtagagacggagtttcaccatcttggtcaggctggtctcgaactcctgacctcaggtgatccactcacctcggcctcccaaagtgctgggattacaggcatgagccacggtgccagatcctcaattaaggttttgacacaaacatgagaaaatttaacattgtcaaaagtatgctgtgaagatgtgtataaatatttactcaattggaaatctgcatcctcttctcaaacacttttttgttgttgttgtttgagacgagtgtcgctctgtcacccaggctggggtgcagtggcgtgatctcaagtcactgcaacctctgcctcccaggttcaaacaattctcctgcctcagtcttctgagtaggtgggactacaggtgcccgccaccacatctggctataatttttgtatttttagtagatacgggtttcaccatgttggccaggctggtctcgaactcctgacctcaagtgatttgcctgcctcggcctcccaaagtactgggattacaggtgtgagccactgtgccccgcttctctcacacacttaaaaataaaaattatcttgtaataaaccgtttactcatattttaaaagtttgctcttggaaagaaaaacacgtcatcaatgttctccaagtaaaatgcttttaggggaaacttttgaatgttttactgcagactactcaacaaattgctattttggatagagggccaaatggatttctgttttatctgagtattaataaaaaaaaaattcgaaagcttggctctctcaaactatgtatctgtgcatcatatatgtggtttatggcatcaaagttacagttcagtagatttctaaaaggcttttgagacagagacatgaatttttacagattctaattacaagttagaagtcatctcactgtgggaaattaaaaatggagacaattagagaaaattccagttgaaagaaaaatgcattatggaaaaagcaataaaagcacacacaaaaaagcaggaaagtaaaaatcacttatcagtagcctctagtattcaattgtagatcaatagtgtgtagttagtgcattaccaggagaacattaatttgcaattaccgcaggtgatctgatcctctcttctgtccattgacacaaatgaccctttgttgaaagagagtctgtagtcattattttaaatagagcaacagaaaggcaaaaagaatgcttaggtcactttcagtcacaagtatcttataccacacaaaatgggaacgtttatattttagcgccagtcacgtgatggagtgtcatgggcctaagcatgggcgtgcctgtttgtgcgcaggaggaatgtggtatgcactatgtgatggtgggtaaaaatgattcaaggatgaaactacaagtgccctcagttaaatataaaataacgtagacctttcataaacctctactacaaggaaaggtatgagagattttagttgaactaagtgtgtgtttttcattgcctccttttgaacatacaatttgaatagcctgggaggtagagaatcagatgcctcaacaaccatacattcttgaaagaaagtggacttcggctctctagagacgctattgtaatcataaataatatggcaaggactcagatgaccttttccagaagctactggacaggtagtgatatcagtctcagaatcaccaaataagaacaggaagtcactgagaactccaccttattcatgaatgcttcaacccaaatgaaaatgcatcaaattgtttgggttgaaatcccagctctgttgctcattagctatatgaccttgggcttactagacgtgtgaacattttatacttcaattttgttatctgtaaagtggagataataatactacctacctcgtagtatggttgtgaggattcacaaccatatgcaaagcacctcatacagtatctgaagcaaagtatgtgtaccacagatgcaagctattaattatcatcatcagccatcatcatcatccagtctgctagtagttttatgcatttatgccaaattttaaaataaaatgtacagccctctattctagcttttgactagtatgtatcttagctcagggtggtagaaagcagaacccaaggaaagggtcaagtgttaatgttttgttgggagataaaattctagggtagcaagagtaaaagaagatggaaatgagacagagaaagatgagacttgaatacaaggtaatgcattactgagttagccactgcttcacaagcttcagtgagacaagacagccaactggccacgtggaacaactccagatagactagctagaaagcaatgccttggggtaatccatcacaggaaaaaatggagaggaaatgtatcttctattcccttctgccttctgtcatgcattggttgaagttcatccttctggagagtccactacccagtccttctggattttatcacctggtgaaagcttcttcaacaccctgtggtttggcccagtatggcacttaatccactatattactctcttctacacttgtgattatccaacgtggttgaatattcataaagttatacacaatttctgccttattttggaggatgtgccttcatatatcttttattcattggcctacttctttttaaaactagatagaatctatccatgctattttcatagaaacagagactttcagaaatggagaaaaccttgacaatccataaatagttgaatcttatattcatatgactatgagtggtacacaggtgagtgaaaatagtgtgcaattttataatagttttaccatatcataacctaaatcaagtcactcccaggatgcaatacagaaggctaagttggatggtctcaagtaaaatttggctgctgttagggaattctattggtacccccaaggcttgctggaacctggagaaattagtacagcagtgacctaagcatggagaagtgatccctgcttgttgctggaaacccaggagaagtgctctgaaatgctttcagtaatgtgctttaaaaactggcaagcatgcatgcaaaacatcttctaaagctattaatcagaaagggatttgacaagcagacggcacatgtgcctttctagaaaagtgtctaaaatgggcattttagtaactcgagagggggaatatcatccttttgccgtttctccatttattccttggtcaaagcagcagtgatccattaatcacccacgtagtcaagtgaaggaggaagaagacaaggaaacaaataaatgggataaagaaaacagaggacgaaggtccttatggtcaaacaattgacaattttgtaaaggaaaacagcttacctacagcagtttccttttttatccccatggacaggtacattttattagtaaaataaaccactggttcaatcattcattcaaagtcccgtatttgactgaagtagtctggcaggtcaatctgaccatttagaagttttaaccattctaattgtcatttaaaatctgtgatttgattttcacagtacctagcattctagtgcctggacattgtgataaccatcttaactatcttaagctgacatcatgtaaggaagcgatcattaagagaacataaacagcttcccaaagcctaactataatccacagccaggttaagtatgttgtcactttgcaaattatgataataaaaaaattatcatggttaacttgtatgtgaaatttactatgagacacaccttttgtaagctaaaagttgtaataatttatttatacctccagtaatcctgtgagatagttattgttatagattgaatgtttgtgtccccccaaaatgtatatgttggaatactaaccccaatctggtagtattaagagataggcctttggtaagtcaaaggtttgataggtcagagggtggtgcccttataaatgagattggtgcttttattcaagagactccagagagcccctattctttctgccacttgaaaacagcaaaaagatggccatctattaacctggaagcaagtcttcaccagacaccttgatcttggtcttcctagcctccaaaactgtgagaaatgaatgtttgttattgaagctacccagtctatggcatttttgttatagcatgttcaaacaggctaagacaggtgttattactgtcctcattctatagacaggaatgttaagttacaggatggcaagttgtgatatgaatttacacaatttggcccagaatctgttattttaaccggtacactatgttgacatttctgcccactaaaatggctagtatcaaaagacagataatacttaatgacggtgaggatgtggagaaactggaatcctcacacattgcttgttggaatataaaacggtgcaactgctttggaaaacagtttggcagtttcttataatgttacaaaaatgtaccatacaatccggaaattccactccacatcatctatctcagacaaataaatatatatatccagaaaaaaagacttgcatacagatggtcatagcagcattgtttctaataccccaaaactggacacagtctaaatccctagcaggttgatgaatggtaaacaaaatgtggtggtacatccatacaatgagatattattcagcaataaaatagactgacaccataatagcacagaatattttgacatgtataaaaacatgctaaatgaagataaaaagacacaaaatactaatatttgttattataaaattccatttttatgaaatgattggatgtgacaaaattatgaggacaacgaatcagtagtttcttgaagcttggggaggtggtgaacagtggctgctaaaggatgcaagaaaacttttgggtaattggaatatcgtaaaaccaggttgtggtgatgctgcacaactctataaatttacaaaaatatcattgccttgcacacgtatagtgggcgagttttatgctatgtaaattataccataataatgtttttaaaaacccacatacttaaagatagcttaaataatatgtgtaatgaagttattaaatactgaattttgaaatctgaattgggagcgattcatagtggagaaaaatctgtaggcaagtaagggggatttcactcatgcttaggagttctatttcttcaaagtcttacgggaaaatgacataatacctttatttaagatatgtatactattattagtatcagcaatgtaacaaaattaatgtttgtgaaccttgccaaatttaaaaataagcacgtttaaataagtctgcctaattaaggcatcctgggtaggaagcatttctatatttctcaagtgtgttccatgtattaaagtattaaaattagagtatttccttacaaataagcactaatcatactttgtataaatgtttatgaatgttgcaagttatttaaattttaaaactgtatattatttaagaaaagttaaatatatcaaggagagattggctttgaagctgtcaataactaatatctgctgagaaactcagtcataaggttcatattatcaaacagtgtattatgtagtggtcataatttctattcattcagcaaatagttactgagtgtctgatgggtaccaggcacattagtaagaaacagatatataagaaaaatgtcagatagtggtaagtactttacattaacttagaatttaaattagactgtgtgatagtgactgggaggataccttgtctggctggggagtcgtctctagagcagtgatgtttaagctgagaactgaatgagaagattcatccagctatgggaaagtatggagaaaggcattgcagaaagacagagcaaagctcctaaggcagaaataagcttgacatactgaaggaaggccaacgaggcaggaccagatcatgcagtactttgtagaaagtgttcccatttttgcaaagtgaggcaagacattgttggtcttatgcagtggcaaattatgatctaattaatatttttaaataatcatcttagctgtcgtgtagataattaatttaggagggtcaagagtgaataaagaaagtattgcagtgaggcaagtgagagaccatgattgattccagttgcaagaagctgtggttatggcaacaaatagattcacgatatatacttgaagtagtgctacaagatttgctgagagattgaatggttgtggacatgaaaagaaagggacagagatgatttctagactttggactggtggagtagtaggctgcagtgagtggaaaaactaggaatggtattctggctatagttaagatgcctaggaaacacctccgtgaaaatgtcagataggcactagtatctttttgtttctatcctactttctagacatgtctcaagcctgaaaatgcatgtacaagccaatgcagataaatgaatgtatgtcttatctcctagctaggatgtatgtgcattttcacttcttaagaatgcctcatagtaattgaaataatattaggcacaaagcagatatgtgcatacttgcttgtggacagatgctaaggggagagaggaatgccttactgtaagtctcgaccaatgaatgtttaaaaatggacaataagcaactgtgttttgaatagttcagaggccagtttcagtaagctcttgtcattctcagaaatatgttcctgaagctaaattttagaagattatgaatctttgaggaaagagtaaaagaaatgaaattcatatcaaatgtacattttaaaataaaataagtaaatggtctataaaacatttccctccaagggggagggaaaaaaacgctctacatttattagctttaaacacatgctcatccaattctataacttgccttctttgaatattcaggaaacattccttcttcattttgtttaactggtcagatttcctacacatttaatatttttgtggctcatcagtcttttgaaaacttttaaaccagattctcctggcctgaaatataaatgctccaagttaaacatttctcttcccctattctatggtcatgccccacataatcagaagaaagaacaatgtttgctcttagcttcgtttggcagatatgaaccaggaggaccttaacagtttgtggaattaaagatgtaggcatgcaaatataaactgccattatctccaaatcaacaattctgtgtttgtaagacgaaagaagataatatgtctaaagatcaaaatatcaaacctttgtttcagatagctggcttaatcccacagtgatagacctgtcagatattataatatttagcatatttcctcatgtggaaaatgatgggatttcagttgtcatgctttaagggcataagcaataatctcattatcatcttcctaaatcaatcagtacatcgtggatattaactctggatgacaccagatgtagcaatgaatatgaggtgagaggaaagtttcacgactcatcattgagcctaaaaacaatgacacaagcaaaaaatcagtttaatcactggtgaatttgtatggccaaatacatcacacattacacatgcctggtcttacacagctacagtaagaatactgttgcacatttataaggcctgatgtctctaaaacacaaaaaataaatgtgagtaatctggagggagtttaaaaaaagccaattctattgcatgtctgagcattatttaattaggtaatgttgattataagcagattcaaaatataagcaatggtttaaagtgtgacattttatagacaaaaatgaaatataaaacacataaaatccaacttacctgtatttatttaccttatttaccttttctttgacctaattcatattcaataattgatttaaaacctgtagtatattgatttatgggtaggcggtggtaatatgattctggtttatactctcaaagcataacaattgaaagtcaggtcatttccttgtctcaaaattcgatcttatatgtttatctgtgtgtgattaagttaattgtttacaacaaagatatgatcattttggtcctggagctcaatggagcaactcatcttagaaattagtcaatatggaacacacacacacacacctcagaagacaccagttgcacattcagatacaaaattcagaacttgaataattattcttacctctgaatcaaacgcattgtgtcacacctataccaacaagggaggccttcctagtaaacagtacttaataattcttatctcatttggtcctcacaacagctctgcatggaaagttcattctgacagaaaacaaacagcataacctcaggctgcttcagtcaacaattttgtttgataattgaatgtgaaaagaaaccggaagattagtccataaattaacatgtgctgaatgaaagaataaattaattagtaggtagtttttgagtaatagagaaagtttttgaagaaatgatgagtttgaatatagctcccttggcgaagtgcagtgtgtcacacctatagtcccaatccttgggaggctgaggcaggaggatcgcttaagcccaggagttcaagatcagcctgggcaacatagcaagaccctgtctctacaaaaaaattaagaaattagccaagcatggtggcatgcgcctgtagtcccagctacccaggaggctgaaggaggaggattgcatgtgcccaggagtttgagactgcagtgagctatgatcatgccactgcattcagcctaggcaacagagtgagaccctgtcaaaaaaaaaaaagaaagagagagagaaagaagaaagaaaaagaaagaaagaaagaaagagaaagaagaaagagaaagaaaagaaacaaagagaaagaagaaagaggaagaaaaaaaagtaaaagaaagaaagaaaagaaaagaaaaaagaaagagaggaaaaaaacaaaaacaattgctctcttctggtaaaaattcagaataatctattaaacactcctggctacattcccagcaaacagagagaaggcctttactgggcatgtgcagtggttttgcaggacctgtattagaggaagcaaatcatttacaatggcaataatatttgtacaaatttgctcaataatacattttatcatttactttgaactatttcaaagtaatttgatgaagtgttgaactttatgaacttgaaataattaaagatagagagggaattctttaaaatgaaaacattagtcctgacccaagaatgctggactgacctctattggtgcgtgatgcagaaacccaaaaaaattagataagagagtctagacacaaaacaagatagaagaccttttccttagcgtctctgggctctgttttatctgtcctttattagagttagaatccagattgctttaatatatatgtgtgaaaattagaacattgtatatattggatttgatagtgtgaattcagtcattgttaaatgagatcttttatagggttcttaattatacattccttcagttagtgttaaaggggactatcataagagaaaacataatcaaatgacaattgctgataagactcaggcatccagactgggaacaccagagatgcaaaaatctatacacaggctttgtccagtttgtctgtgacaaatagtactttgaatatgaagaaaaatgctgaagaagtagagttactccctgcatccttgaaatacattggcatatccaaagaagagttaagtaataatgcaaagatattaatgtataaatgatgcaatgagtgatatagagtgcagcaaaagttgagagaaaagtattctcttgtggattgatgtgagttcttaattatgatatattcgtataattggagagaaaaatgtattctggacagggaatgaaagggaattgtgtttgtcactgactgatactattacaatatttttattttgcttcatgtattcatccattgaataagtcatatgccaggcaaagatctttatgtggtaagtactgggtgtacaatggtaaccaaaagaaatatagtctctgccctttttgctgtgtctctgaaatctggtgaatgagatccaaatgatgatacctattgtgcagttatttaggcactgaagtagataattatgtatgttttatttgatataatacttacaagaaatctatactacatatacataggtatatatgtgtatatatgtgtctatgtataaatatatgtacatatattgtatatcatacatacaatattgtgtgtatatagatgcttgtgtgtatatgtatgtgtatgcataaacctaaaaacatatacacacatacatataaaacatacattaacataaacatataaacatgtatacgcacatatgcattataagcatatagattatatatatatatatatatatatatatatatatatatatatatatatataaaatctccctgttttcacatgaaagccagttgccttcgtagtagtggtcagaacagaaagcaggactgcactgtggttacaagaaaggatcctgtgggcaaactgagccagaattttaatctttgttctgccatttagtagctgtgtgatcttaatcaaggcctgtaatttctgaccccatatttacccatctgctaactgaagaaaataataatacttacccaaggtgctattgtgagtttcaatgtggtgctacatgtagacatattttgaacagggtttaaaacataataagtaacctaagtaaatttcaaaatgctgtaatcataagggaatttgggtaaagcataaagaaataagttacaaaaggacagaatattaagtttgttaaaatacaccaaacttttccacccttaaaggatatggattttgagtagctccttgcctcccctgtcccctttgagttttttttttaggctgaaagacccttggaggagtgtctggagaagacatggaagctccgtacccctccctcataccttgccctatgcatcttttctgtttggctgtttctgagttgtatcttttatcataaaagggttaaactgaagtccagtgggacagcagagcaagcccatgattacaggcaatgtccaccattcattccctgccaccccattcccattaagcgctggagatgccctgtgaggacccaattctagtgaaccacattgtgtgagagttcaacaagattcaagacaagtacaagtttccaggagatgcaagggttagaggaaagaaatgtaaagaacactgtggcaaagcagccagactccagcagtagggtttctacaacaggctggtgcaatgaaaaagaggctgtgccagataaaaggaaccttgaaggacagagcaactggatgcaacatgcagtcctggattgaacctaggcttggataaactagctataaaaatattatggaaattgtactatggatatcagattacactaaggaattatttattttattaactgttaaaatattatttggctatatagaaaaatggttttatattttaaaatatatgaagttcttactaaagttgaaaaaaactgtgataatttttcaataggtgaatggattctgttgctacagaacaacctggagcaaccttaaatgcatactgctaagtgaaataagtcaatctgaaaaagctacatatatgtgatttcaattatacgacatattggaaaaggcaaaactatggagacagtaaaaaagatcagtggttgccaggggatgggggaggtgagggtgagggggatgaatacgtacagcatagtagatttttagggcagtgaagctattctgtataaaactctaatgatgaatacatgtcattatacatttgtcaaaaaccatagaaaggtacaatgcaaagagtgaatcttaatataaactatgaattttaataatagcatatcaatattggtgctttaactgtaacagatgtaccatctaatgcaagatattaataatggggaaggtgccgagtttgggggtggtgtgggcgtatgaaactctatgtactatctgcccaattattctgtaaatctaaaagtgtactaaaaagcaaagtctattaattattttttttaaagttggaggccaaaagggaccctttaaatctaggattatctgggtcaataacaggatcaagtcgggtcctcttattggatcaagtcaggtctccaggattccaaatccccacctaagtaataaaagcctggtgaattagatccaatgttaatgctctgaggcctgcataagtatctgaaagaccagaatgttaaactaaaccaaaagtgacggagcattttggaatgcattccacagggacaagtgaaagtctccctccaatataaagacaggaatgaaaaaaaccctctgagtaagggaatcacagatcctagtggtacaggacaatcccagtttatactgctggtcctggtattttcactaatagtttcctgtttactctcaagtgtcacagtttggatggtaaattatatggtcatctctaagcatcctcctaaaaccctcagcctagaacttttactggtgtttgtaatctttcttcaggttgtcagagtcacaaatcataaaatatgtgcccttttagtgagaaggcataaataaaactacttctttggacattgcatttgtttgtctgtaaccatgttccagtagatccatcttttgtagctgaagaccaggcattttacttttaggttcttggccttcattaaaacaaaaagccaaaaaaaactagcatacaatttattttcctggtctttctgcaaaaccacaaactttgtgagcttttatttttccatatacacagtaaagggattaaaaatgagtttagtatttttaaaagttccttttaacaaatgcaaaccttattgctttgcttctctagccctcccataaatatgcaccgtgtttaccatatattaacttcaacattggtaaggttgttttgtttttcctataacgcttaactcttacatagtttattcactcttaatcaactgaactttaacttttgtgtcccagaatatattggcaactcagtcaaaattgttgactcactgataacagccaagttgtactctctcacaaatttgtgtttttatcaattatagattaactatcacaccaactactgaattgtgaatgctttcagaggtagtcaggactatttgagatgttattttcatgttaacaaatgtttctcattgtaggtgagttgttctttttttttttttttttttttttttggaatgtgaatgtctgcttagttattgagtgaccacataactttcatccatcttcagagttcagaaaaaaattccatgcgttaattttccctatagactttttctctttttttttttttggggggggggggtctgaactcatcctttattattttttttattttttttattatactttaagttttagggtacatgtgcttgtgcaggttagttacatatgtatacatgtgccatgctggtgcgctgcacccactaactcgtcatctagcattaggtatatctcccaatgctatcccgcccacctccccccaccccacaacagtccccagagtgtgatattccccttcctgaactttttctctctaggcattatgacttctcctctgtgatcaaactctatctggtattttagtgaatgatatgataaatcaagttttcccagctgtgttgactctgttgaaaaagaaagattgcctaaaattaaggatttgagtcttctgacagctattgtttggatgtttagtttccttttcttaccccacttttatcatgagaggtgctgagcatgcacaatgctacatgcaaacccttacaccaccacctgtgttactgcagagtaattgaaaattgctgtggtaactgatgcagcaccaaagcctgatggtgagaaacgatgttagtagaaaaatcctactgcctctgaagagcagtggccaagcttcctcaaactgcagccacagttcctaaccaaagaatgggctgcataggatcctggtgtgtagaagactccagttgttacctcagtcttttgagtcttgtatttatgcccgttgggaagcagagccatcaacagcaatatctttgaagagacagaacagtaatcaccattctttggccctacatgttgtacctgtctcacccattttatctctagtgtcacataaaaggcagacagaggtgctgtgtctctgtatggttcttattattatttcttggttgcagtcattattgagatctgagtccagttagagctcactttgtaaaggacagatacaaggaagggggcagggcagtctcgcctgcagggcacagccctttgactaatcagcgcaggccatcttcagtgaaactgtgtcatcaacaaagtgcaacagagaagatcagtctcacaaatgctcttctgaatagtagtcgagtgggtggcccatcatatgctgcctttgagaaaatacttggagaattgatgattatattctggctggcaaaatgtggtttggatctcagtataatataccttgaaaacatattattctcttcagtctgtctttagctgatcttgggttaagaaattaattaaagaatgaccacagagttacactgaaaaatagactttcaggctacataaagttccttcctaattggaggaaaagggggaaatttttatacttaaaatttatcagagaatttatcgtttcagaggataagtaatgtactgagaagaaatatatgatttacaaaataaatgactcctataccatttggactgatcaatgagtggcaattaaaaacaactttgaaaatatttaataagcagaactacttatccatttcggcaatttttctgaactgaacttttgaaaaacaacatctccggggctattcgtttgttgttctttttttcccaatcctatttgctgtggtcagaacatagacaactgaactcaaagccagatttcttagtagaatgacatttggacagctattttacttagtgatcctgtgcagtttcgtagcaaagctgaaataagccctctccttttgggggaaacaagatggtattctgctgaatgctggaattttatcactttgggaaaaaaaaaaaaaaagctgcttgagagacctaagaatataaaagcatttgagatctcagaaggagtttaaatcaatgcactgccacagttacagagcagatgagagagcctgctgtctcaattgccaggaaactacttagaaactctcactttgatttcttcacgtagtccgttacattactgctaaatgcaatatatagggacatcatgactttgatgttgtacagctccaacagatagaaactaatatgatagaacaactaagatttgtggttttatgtgaatatacaaatacatccccatctagttccctatttactatgtatctccaggggctgtcttttaacctatatttttataaaattataattttggtgttttattcatgaattccagtaagcaatgccatgtttatgtagtaccaaaagctcataggcggatattgttattctgaattcttaccttatctatatgtattgtacatccatttttaaagtacaatgtagttttatacatctgtttgttagtactggtcagaactcaattccgtgagtaattattgattccatgccttcagaaaatctgatttttttaatcagtaggtgtggacagatagaattagaaactgcataacatccgaaaacaggagaaatttagtttccagttaaagtaagaaattttaagtgggtcatccaaatattaaaaccttaaatgttaaaaatctgtggatttctgtcataataattaactaataaatgtgaaatcacttcgcttctttttatgaaaattatacatatatgcttgtttatatatgtaagactttcatctcatttaaggctttgaaatttatggaaataataataaaaagaaaagataaaaagctctgcagaggtcagaaattctgagtcttactgttggccctcccagttactaatcttgattttgggcactgcattcaatgtttggtttcaatttcctcacttactgaacaattcatagcaccttctctgtctttctcttagaactgctgtacgatgatattgacagacagtgttgtagcagaaagagcttcaaaccaggcgggtctgccagcactgcctccaactagctgtgtaccatgcacagatcatttagccagtctggactcctgatctctgaaatgaggaagctggtctgaaaaaaagtctaaattccctttaatcttgtttgtcaccatgctttgaaaactataaatcattgtatagatatttctttttgacagcatgctttgaaaactataaagtgctatataaaatattgcagatgttttgcatagtttaaacaaaatatgtgcttatcaaaataggttagtaagaagagataatataaccttctttttcctgagaaagctttaagaattggatgaacaacccttcttattcagtgtttcatatatgaaccacattcatgggaggcttcttgaacctcttccagatacataactcagttattaatgcaatttgtgatgtgataaccattgcagaagaatttccgtttttgcttaaatgtagtaattctccaatagaacttttactaatgaatttacagtaaatttgagacaactttagacttaaattgtaagcatatattttacttgcatataacctggaggcacatacttctaagtcctgaagtgtagtttatccacctgtatgataagaaatgaaaagggataattatggtcatgggtttatctgagttgtgtttaatagatcaagatctctatttttaaactttgttatattttaaaatagcatttgaaaaatgtgctatttgattacacaaaagcatgtgccagtctcagggtgttcctgcttttgtagaactcttctctgccaaattatttacctgggataaatatttttaatctaatttagattttatttgatagcttccttgtaaatttattttacttttcagatgaagtgagcttttttttaataggcaaaacttcccattttggcctctgccaggcacttgaaattctagattacgtgaaattctacaatacctatgaggtttagtaccattctgtctaagctttataatttccacagtacttccaccttcatggtataatttaatcttcacaacaataagatgttatcatcctcctttttcagatgtaaaggagggagaagggaatcaacaagctaaatgactagccctagttacacagctgccagatgacaagagttgggtctcagacctgagtcttctgacaacaaaaccaaagctttttttttttggagatcattatttaatgcaaataaaaataaggtccatgcctttcctctgcagtatttgaccaaaaatgtattacattaaaaaaattatatcctgcctaattcatgccctaatgatttattcatagtatgaaatttaattttggtgccaatgtagctgagtataagctactattttaagcacttaagtatgttgccttttagtttcctatgtgctaagtatttaatctccatttttaagtgaaaaaaatgctcatgattacacagctaagatgtaattggaactctattctgcttgacttctgtgtgcatgctctcagcctcttaacttaatatggcatagaaaccacaagattgactttaagaaacaggacttcaagtccaagctctttccattttacaagtaagaatattactccctctcctgactaagtcagctttgagtactgaaagaaataatgtatgtaaagaagattttgaagacgtaaatctccataaataggtaatttactgataatctagttaatctcattttatgagaaataatgagaaaagaatagctccccacaaccctctgttaccatccaggtatttgtacagttgttctgcacaggtcggcctctattaaatgcgtctgcacctaaagtaaaaattcagggcactgtgtcagacccctggaggaggctatttggtgctttatggaacacgtcaaatcacgctgcacgggggccaccacctactctgctcctgtgtagggctggtcctgctgagaatctaggggcctctctttaaaatagctcactatagggatattcacacatatagaaataattaatggtggcaacgatccttataatggcacctgatgccctgctgtgaagaaagataaaccagccttcaccataaagaacttacaaattatactaagcaaacatgttaacagctattaagagtcctaatcagagctgttaaacaaacaattaagagatgtcatataaaatgcacccatttaggcatagcagctacatgtttggagttttaacaagaacgatttacctttgagatagcgataaggccctcaatggagtatataagttaggcaaggacaaggcatctttctaagcaattccatttcctgagatcaaatccatgggcaaagctgttctcaatggtgcacttgcatcctaagttttatttttagtcttattagtatttaatcagcaaattattcttgtttcttcaaacatgacttcttattataagtagtgcattctttgaaaggctaggaaaatgttgatataatctaatagtaaaaattaagaagaaacctatttgtttagaagaaatttttttttgcagtcagcatttcagttgagatgagattcacccctgccagtgcttaagactttgctgttctaagtgtggtccagcagcagcagcagcatcccccgaaaatttggccaatgcaggatctcactccaggatcccactctaaagctacaaaaccagaatctgcattttaaaaagatccccacctgatttgtatgtgcaacaaaattttaaaagaaaatatcaatgtgcaaagttcctactatcaaaaattctatcaggaaaattagtaggtttaatcttattggaagtaaaaattaaactactcattttgtaaaggtacgtaagtggtgtgacatttgccatatgattaagtatatctgaagtggtcccctccagcactcgtgtctcatggtggattccagggcttccagcattgcacactatcccagtcttgctcagtaagtatcttgtagtctctccttcctcttaaggttttgtgttcagttcacattctcagtatagctcccaattatgtgaaacaccaaccctgtatgataaagagtctagaagtgggtgggaaagaggaagttttcttagccttgggacctaccatgttcttctacagttaaaagatcccaagtctacattctgatcactccactccttgtctgagtctactgtatacaaattgtgccatgtttgaggattgagataactcatagcttttgtatcttcttcctggaaacatcagggatgatttagattatactttactgttcatcccttgcagtgtatttctagattcattttagcagcaggattttacaataatcatgaaaatcccataaagtacatgacattatgtgattttcaaaatctgatttcttatgttcacatggtgaactattttaagactatagtaaagtatacccataagcatatactacaaaaaaatagaatctcagagtgagcaaagaggattaagtaaagcatcagttgacttttatagtcaaaagaaaaaaaatacccctgtggaggaaatgataatgatgttccttataattgttgtgagaaaaaaacaccaccaactctaagaaggttataacaggcctaattaatgttcaaattgttcctcctgagaaacagatttttttaatctgatgtaaatgggcttcctagaaaatgttcttgttcatatttagtagttattctatactcttttctacattgtactaacatgcagcacttcagaatagaaaatgaaggggtttttgtttctgctttttggttttggcttgttactattcttactcatactgtacaagtaagaaggtaaattgaaaacattgacaatttttgtctaaaagtgtggattttttcaaaaccagagctatatttcagttgaagataacttgattaaatttttaaaaacgtatgcatttggtccatgcaatagttgtaggaaagtatttgtagttatattaaaagtttttcctctgttaatgtctatatctaggtcatattctattgtatggccaggaattctggtgccaccactttctaaccatggggcctggagcaagtcatttaactttcctaagactcactttcctcacctgtaaaatggggctgaaaattaaacctatcttttagggttatcttgaggactaaagaagataatatatttaaaagtgctaacaaagtgcctggcccctaagaagagcccgcatcatgttagatattgcattgttttattctcatcgcataatcattcagccaattttgacagaaatctcatacacagaaatcagtctgtcctattctgaaatgtaaaataactgtatctccttaaaacataattattttcattctttaaaaaaataaaatgcaggccaagcatggtggtccatgcctgtaatcccagcatttgtgggaggccaggtgggcggattgcttgagctcaggagtttgagcaatatggcaaaacctcatctctataagaataaataaaaaaataaataaataaataccaaaaacaattacccaagcatggtggtgtgtgcctgtagtcctagctacttgggaagctgaggtgagaggattgcttgagctcaggaggttgaggctacactgagctatgattgtgccactgcactccagcctgggtgacagagcaagactctgtctcaaaaataaaagtaaaaagcaaaatgcaaaaccctataacctataaccccagctcgcctcttcctcttacaggagccaaacttcttagaaatgtgacctggctgcatatctttagttcatcatccctcatccattcctcaacctaccaaaaaaaccggcatctactccattgcagatctctcctataaaggcaaatgttatccggtatattgccgagtgttacatccagtcatcgcttccagctctgatattcctgacctttctgcagcgcctgacttaactctcttggatctcttctgctcggtgtccctcacgatcatcttccttagccttccttttaagtgctagcattcccagaatttcacacctggcatttttttaggtacacatcatggaatcactaccactgcttgctgagaactcctaggcatatatatatatatatatatatatatatatatatatatatatatatatatatatacacatacatatacacatacatatatatacacacacacacatatatatatatatatatatatatatgagagttctgtctctctctctctctctctctctctctctctctctctctccttatcccattccccattctggaacctcctagtatgttttcaataaattctctcaaccaacctagcaacaatgaggtatcaggtagcatgctaggcacgaggcttacaataaaatgtatttaatcaaagacccaaaaggctttaagagtctttgaaatagaatcttattattctgttttcaggcatttccttcattttctttttcattcatgcatgacatgatttttctttgttggctgccattgccagacaccctgatatactaggtattcaacatctgggaaaacaggatagaaatgagtttttctttgctcagttttgttttaatggttgtttcattgtttgaagttgaaatataaattgggaagtatgttgaattcatgttgtaaattttgaatttgatgtaatgttgggccatgttggtgaagaggttctacaggaagttgtaaatgactctctggagtctacatgtgatatcaaaattggagggatatctttggaaataagcaacctagaagcagtatctaaatccacattcttcaagctttaactcaaatcccagccacactcacagaatccccagggtttttttagtggaagaactttaatttctctgattcaaacttccttaactccagaattttttattttagttctcttttctttttaatcttttgtaatagtccattctcatgctgctaataaagatatacctgaggccgggcacagtgggtcacgcctgtaatcccagcactttgggaggctgaggcgggtggatcacaaagtcaagagattgaggccatcctagccagcatggtgaaaccccgttcctactaaaaatacaaaaattagctggacatggtggtgtgtccctgtagtcccagctactcgagaggcagaggcaggagaattgcttgaacccgggaggtggaggtcacagtgagccgagatcgcgctgctgcactccagcctggtgacagggtgagactccaaaaataaataaataaataaataaataaaaagatatacctgagactgggtaatttataaaggaaagaggtttgattgactcacagttcaacatttctgggggaggcctcgggaaacttacaatcatggcagaaggggaagcaggcatatccttcatcacatggtggtaggaaggagaagtgcaaaggaaaaggggaaaagccccttataaaaccatcagattgtgtgagagctcactcatcatcacgagaacagcatggagataaccatccccatgattcagttacccccaccaggtccctcctactgcacgtggggattatgggaactacaattcaagatgagatttgtgtggggacacagccaaaccatatcatcattattcattcatcttatatttgtggagagcagactaacagacaaacagtgtcctagtcactgcagataatatagtgaccaaaataaatgcagttcttcccttctgaaactttggtctaattgggaagtgagttgtcaactaaataataatgcaataattagaagttaaaaatgtctgattaaaagaaggccataacctattctgggctcctggaagcctccttgaagaagggacatttaccatgagcctgaggaatggttggtagttagccatgtgtggaaaagaaaggccttctagccagtgagaaggtcttgtgaaaagatcctaaggcaaagaaagactatggcattttttttgaggaagaaaggaaagacctgggtaactggatcatagttgacaacaaggagaacaatagcagatgaggagggagacagaggcaggggtaagtgatggttgagttaacgtaataaacagcactccaacctcagtttgaccactttcagacgtgagaactgcctgcaggcagcacatcccaatagagtgacaatgagaatttaaatgtcctttattatgttgtgccaaattcgactccttaagcctgacatataataaactgtagctatttaaactatacaacttaataagttttggaacatgtatatacctgtgacaccattaccattgcaagtttatgaaaaatgttcattgtccctggaaatttccttgtgttctttgcagtccattcctccccaccacccccatctccagacggctactgatccatcatgcctcaaacagtgcctggcacataaaataaatatttgttgactcaaagaaaagtgaatttgtttggagaattatctcttggtttgacacttggttgactgctctgtcttttctaggtatgcagtgccattcagaatcaggatttcactgtgatcgaagactactgcactggcctcaaagccctgctttatctgaaaagcattgaagaactacaagactgggatggacagagtccagctactgtgagtcaccagaaagggaaaccagttccacgtatagctgaactcatggacaaggtatgtgcttaaatctcctgtgttattcttgagaactcagccttggtttctatttcagatcttatttaccatctcacattctcactaacaaaggaaacacagtgcctcctggatgtgatttcttcagtggactctttctgaaggagacttgattacagccatatgatgggtctgtgagttacctttttataaaccaatacaacacaagattatataaaaggaaaagaccgatgtttgcagtgtaaagtgcctccaaattcttgcttactgtggtgatgactggcattcttcccagtgggagtctggagatttctttatgctttctggaaattataacattacctttctattttcaagacaatcaaatcactgtagtcttgaataatataaggaagtttttaaaattaaaatctaatcagtatcttttgtaactgcttctgctgtgtggttaaacccggtctcaaacggttatggtcccagctttctcactaactgctattttccaagaaatatacactacatttacgttttctataatacagtgattttagcaacactgctaaaacaacattcagcattttgcctttgtatttcctttgtattattctaaatagataaccattgtcagaagacatttcttgagccctcaatgaggggaggaaaaaattataattcttagtcttttcagcttgtcactacatcaataattaactttaaaaaaaagagaggcagtataaaaagattctttaaggaagcatttaataattcaaatgaatcttaacttgaagcaggtcacatgaaaaagaatggaaaacaaaagccctgggtactctgccttggatgactgggttagggactcagaaagaataagagaaacatcatataattgacttatatttggctagttttagtagaaaatatcactgtccctctcctaatagatagccaaaaaaaacccttcttcaagagtaatgtgtatggttgcaagtccagtaatgaaaaaagaaaaggaggaaagaaataaaatcttacaatgtgggttccaggaaaatgtcatgatgaatgactccatgagtggcaatcaaacagaaagactgtgacattaatatttataatattgtaattagcaagataatgcctaagcagcattattagtgtaactaatcatattatcataaactgactctgcagtatttagacagtgagtgttcttgcctttatcaatgactatcaatatcctaaggttgcttataactaaaaaaaattcacaaatgactttacaatcattcgatgtaaatatctcaaggaaattgtctctgacatgatagtttatgaccatctataaaatcattgtctcaaatttgggtggttgccatgtgagcggaaatggaagtagctgcattgcactgtcatgttttgtctttaaaggattttcacactcgtttcaaaacttacatattcaaataaaagatgggtaatgatgaagacaacttgtgtcaatgacataaatggaaactgatttggtaatagtttgaatcaagattcagactttattttgttaagctcagctttcatcaaaatcgtaagtgtaattttcagcattatcattcgtttaaaaaaaggaagatttttctatgtgattatattagtgattcatttctcaacactaacttgaggaataagcagatggtctggtaatagatttgtgcttctggattctcctgtgcaggctgacatgactaaaacaataggtgattatccctttagatttatatccccagtagtgaatcaaagtactctggatctagggtacaggtgatttcctaatcgttcttttttttggtcctataatttttttatttttctttttattatgtttatattttttattatactttaagttctagggtacatgtgcatcattctcagcaaactaatcattctttcttaatgttgctgctgcttttgtgtgtgtgtgtgtttgtatgtacgtgtgtatgtgtgtgtatgtgtgtgtgtgtctttgcatataactcacattgtcctatcattagccaaagaatagtatgctggtcctcacagtgtccgcatactataggaagatgagagaaaatgtagaccctttgtagaaagacactctagaagtatctggcttctttacacaggaaaattttgtttggaaagtacaatggctactctgatattcactcataggtcaggctagaataaaccagaatagatatttagaagaaacccattacagtgcagtgtttgacaatggagagaaaatgagacttgggctatggaaacaaggatttggccaagtatgtcatgttatctttcaagtaattagcatattaatatactttccttatgcttaccttacttattaactgatcaaactgcctaaccagcatttcttcaggtggctgttgaagggcaggtagttgggtgttagtacacttactgtgcaagccattaaaatctgtgcctgcaagaagagcaaattcctgagaagaacagtcatcagctttggcacaacacagagctgttgatgtcaaactcttggtgcttaaaaaccatgcagcatgcttgtgagaaatgtaggttcccaggccccactagcattgatcctgagtcagtgggtaagaggtgtgttgagaatctgcattttaacatcataattctcatggagggatccaaaaatctgcattgccaaaagggacaaaaaagagaatagcaatagaacagtgagagattgagaagtcagcaatgagcagaacacaagcttctcttgatggagaaagtaaacaataaataattttgagctgaaaaagaagtgaaataaaagaggcaggagaggaatgccagagaagcatcacattaggttccaaatggccagaggttggaaatacccaatgaagaaactgcatgtaggacagcagttattagcaaatagtaagactgctggatttatgtgaagcttccttgttagctagacaacttgggcaagttacttaatctctgtaaacctttttataaaactgtacaatgaaaataattacaatacagttccataatccctcattaacaattctgaaatccaaaacatactgaaaccaaatggttttacataattcattcagcagaaaacctggcctgaactgatgtgagacttgctataatctttattcctctcagagaacatcagattaacgtgtttgattccaggttgctaccccacaccttgctggggctggagagggagtgtttattaaaattaggtgtatgtaccattttacatttctaaaatccaaaagatatttctaaatccatacatctggctccaaaggttttaactatgggcttgtgaagattaccaaaatgaaaatataattgcaaatataacttcatccagaaattcatctatagagttggaggcaatgtatatattttagtgatttcagaaaagaaaacattactatttggcacttttaattatgggaaataagagttatgttgacattcttcgttaagaaacatgaaagaaattggacagtccgatatttgaacaacaaattttgcaactggaaaagcatgaaagaaaatgtcttcactttttggtgcttgggatgagaacaggactcctaaataccagtcatgaaagaaaaacagtagaggccaaaaactaatgatcacttgggatctgcatgcatttccacatgctgttcccgacatctggaatggccttccagttctcaagcatcactttttgagctattccctgacctttgctatagaattaatgtctccttcctttttgaaccttggctgtaaccagtatcacatcgcagttgtatttttgtaagtctgcttcctttactagaaaataacctcacttttcttacccatctttgtatctaagttctctagacatgcactgaacatggtaatgccttaataaatgttgactgaagaagtgaactgatgactaaatgaatgttgaaagaaaaaagcttattggtaacattaagaattagtaatcacttgacttaccaagccattactttttccattacatcagaaaagaaaagaatatgtaaagaaataacctttgaacttaaagttcctttttatgtgtgaattgagtttggtaaaaataacatggaaaaagccagaatagaaggagtgagatagacaggtgagcaacctttatgccttcttgacttggcaaaatatgcctagattataagcttcttgacggcctagaacacagactgtgtgccagtgcctaatgcaatgtctaccatgtaggagtaatggcatggtagctgaattgaacatactgatcaatcattaatatatttttagaatctatcttaaatgtcacttcttttgtgagtctgtctatgaccctcttccttggcctccaagaaagtcaaatcactcctttttattttattacagcccatggttcctacaactagtattgcaagtactgcattttctttaattgtatatcttcttgtccagtgctgcaggtcattacaagcattttgaaggaaagataatatcttattcatactggagtttgcaagcacctagcacaatgctacatgtttatagaattaaattgcacgaattatctgttgtgtccttatttaggaggaaaaaagaaagtcaatgtataattaaaattccagctagatccttttaagaacagcagcagtcattttagaagaaaacaataaacctgccaaattactgtactttcagtaggtttcaaaaatgatgaaatacatattggtgatattaataaatgaacataatctgtgctcattaaaaggctctcattaggataaaatcagaaattctgtcatggtggttgtacagcaactctgaaaacaaggatttgttttgataatagaaaccaaaattgtatccatatgaccagatacatcattctcagttattgataaaacaattctaaaattcatatgcaaccaaaaaagagtccaaatagccaaagcaaatttgacaaaaagttcaaagctggagtcatcacattacctgacctcaaattatacaattaggctgtggtaataaaaacagcatggtactggtacaaaaatagacacatggatcaatggaacagaataaagaacccagaaagaaagccacatatctacagtcaactgacctttgacaaagttgacaaaaagtatacactaggacaaggacacctttttcaataaatagtgctgggatgattggattgccatatgcataaaaattgaattatacttctacctctaaccatatttaaaaatcccctcaaaacccatcaaagacttaaatgtaagatctgaaactataaaagtactagaaaaaaatctaaggaaaactcttctggacatgagtctaggcaaaaataattatgacaaagacctcaaaaacaaatgcaacaaaaccaaaaatagacaaatgggacttaaaataaaaagcttctgcacagcaaatgaaataatcgagataacagaaggcctacagaataggagaaaatatattcaaactacgtatccaacagggactgtcacccagaatttacaaagaactcaaacaactcaacaacaacaacaaacaagtaacccctattaaaaagtacgcaaaggacgtgaacagacatttttcaaaagaagacaaaccccatcaagcatataaaaaactgttcaacatcactaatcatcagagaaatgtaaattaaaaccacaatgagatattatcttataccagtcagaatggctcttactaaaaagtcaaaaaataacagatgtaggtgaggatgtgggaaaaaaaagggaatgcttatacatttttggtgggaatgtaaatagttcaaaccctgtggaaaagagtatagagatttctcagagaactgaaaataaaactaccattcacctcagcaatcctactattgggtttatatccaaaggaaaagacatcattacatcaaaaaaatacattcatatgtttatggcagcactattcacgatagcaaagatatggaataaagctaaatgtactttgacagataataaagaaaatgtagaatactattcagccataaaaaaagaatgaaatcatgtattttatagcaacatcgatggatctggaagccattttcttttttatttttttaatttatttttatttatttatttgagacacagtcttgctctgtcacccaggctggagtgcagtggcacgttctcggctcactgcaaccctgcctctcagattcaagcgattctcatggctgagcctccccagtagctgggattacaggcgtctgccaccacgcccagctaatttttgtatttttagtagagacagcgttcctccatgttgtccaggctgttctcgaactcctcacctcaagtgatccacccacctcagcctcccagagttctgggcttacaagcatgagccactgtgccctctggaggccattattttaagtgaaacaactcagaaaaagaaagtcaaatactgcatgttcccacttgtgagtggaagttaattaatgtgtacacatgcacatagagtgtggaataatagtcattggagtctcaaaacggtgggagggtagaagcagggtgtaggatgaggaattgggtagaagcaggatatgggatgaggaattgcttaacgggtacaatgtacattactcgtgtgatggttacactaaaagctcaaacttcaccactatgcaatatatccatgtaacaaaactgcacttgtaccccttaattttatactaataaaaaaaactgaaataacacaatttcataaaactattgctatttggttgtggtaatattatatgtagatgtctaattatctatttttttcctttctggaaagttattcaacacagagaataaagcagtgtccaaagaaatgtgtaaatgtcaacagcaagacccttaccaaaagcataatgacagtttcaaaagaggatactataatttcctatttacaactttaaaagttttgtatcttctatgccacttattttcccttattgaaatataaattacttggaggaaaaatacagaggtcttaaatgaaccatttgacaagttgtgacaaacacatatatccgtgaaatcctcacctctgccaaagcatgcaacattgccaacaccttagaagctgccttgtgcacttttccagccattacatcttcctttaccaccaccagaagcaaacaccatctagcacctgccaccatagattagtttgttcatgttttttagcattcacataaatggaattctacagaatatgtatttttgtatgtgttgcaactttcactcactataatattacagagattttttcatattattgtaggtattagttcatttttgttggtaaataatactatattttattaaaataccacaatttatttactctaagttgtatttaggctgttttcacttttttggtgttataaatatttttgctataaacatacttgcataactccttttgtgaacatgttttcatttctcttggctagtacatagaagtataatttctcagtcataaggtggatgcataagttttacaagaaacttccaaacagagttccaaagtggctttactctttcacagtcctaccagctgtgggtgggtgtttggttcttctatgttccagccaccttttgatattctcagtctttttagtttcagctattctagtacatatgtgttgatatctcattgtgattttaattttcttctccctaataagaagatgttaactcttctttatgttcttattggccttccatgtatcttactctgtgaactgtctattcaaatattttgtccattttttaattttttaattgatttcttggagttcttaatcattctagttataagtccttagatcagcaaaagcatttgacaaaatccaacatccaatcataataatggccttcagcaattcattaatagaaggaaacgtctacaaaaatcctatacctagtatcatacttaatgttgaaaggataaattattttctcttaagatcaagagctgggcaagaatgtccattctttctacttctattcaatattgtactggaagtcctaaccagcgcaataaggtcataaaaataaataaatgatatttacattggaaaaaaatgggcttgcactgtctttatttgcagatggtaagattgtgtgcatagaaaatcctaaagaacctataaatacactattaaaataataagtgaatttaacaaagtttcataatacaaaaacaatgtacaataatagttctgtttctacatgaacaattggaacaatgaactggaaattaaaattttaaaatgtcatttacaatggcatgtaaaaactataaaatacttaggaacaaattaaaatatatgtagtatctgcactgaaagaattgctttcacagcgacgtggatacatgcagccaacaagcgtatgaaaaaaagctcagtgtcactgatcattagagaaatgcaaataaaagcacactaaaataccatctctcaccaatcagaatggttattaataaaaactcaaaaaataatagatgctggtgaggttgcagagaaaacagaatgcttgtacactgtcaatggaagtgcaaattagttcaaccattgtggaaagcagtgtgttgattcctcaaagagcaaaaaaaagaactgctattctacccagcaatcccattgccaaatatatacccaaaggaacataaatcattctaccatgaagacacatgaacacatatgtttattgcagcactattcacaatagcaaagacattaaatcaacctaaatggccatcagtgacagattggataaagaaaatgtggtacatatacactatggaatactatgcaaccataaaaaggaacgagatgtgtcttttatggaaacatggatggagctggaggccattatttttagcaaactaatgcaggaacagaaaactaaacactccattttgtcactcataagtgggagctaaataatgagaatacaaggacacaaaatagggaacaacaaacactggggcctacttgaggatggaaggtgcaaggagggagaggatcaggaaaaaaataactactgggcactatgcttaatacctgagtgacaaaataacctgtataatgaacccccatgacacgagtttacctttattacaaacctgcatatgtacccttgcatctaaaataaaagttaagaagaactgctgaagaaaaattaaagaagacttaaaataatggtaagatatattaagatgttatttctccctggattgatctgtatatacatcataatcccaatcaaactcccaacatgtgttttttagaagttggcaagctatgctaaaatttacactggaattcagacaaactagaatagccaaaacaatcttgaaaaaggagaacaaagtgggaagtgggagaatttgtactatctgccttcaagattttctataaatctgcagtaatcaagcaagtgtgtttgggtgtcagggtagacaaatagatcaatgtaatggatagaaagtccagaaatagacccacacatatacactcaattgatttttgacaggggtgcaaaagcaatccaatggagaaaagaaagccctttcaacaaatagtactggaattattggatacctatattaaaaaataaacctcatgtctacctcacacaggacaaaaaagtaattttaaatatgtgatataaaaaagtaaacagtaaggtaagactataagactttctttttagagttttagattcacagcaaaattgaacagaaggcatatactccttgccttcaaactgtacatttttaaaagcaaacattaagtaaatatctttataaccttggggaaaggaaaaatgtcttggacaggataccaaaaaaacactaaccatacaagaaaaaatagatgaattatgcttcatcgcaattaacatactcatcaaaagatacaattaagaaaataaaaactcaagtcacagattgggagaaaatattcctatacttgtatctcatgaagaacttgtgcccagaataaatgtatataatattttcaaaatgtaaactgtaataattagaaaatttaattttattgatgagtatatagaatcttaaaatggaaaatctataataaggacctgctggtaggctcttgcagcttactcctgtccatctatgataacatttttgggggacttttttatactgtaatgaccattcttggagctaacccagaaaagaggagaagggaagggaatgaaagccatttttcttcaagttcattgtatggccctgtacttcttgtccatgttatcttctcccattacagctttgtccccacagttattctccctgggactgccagacagttacattatgttgttagaaaagttccagatgatatttgcatttctatcagtcacttgggtaatgattgatataaaatatattattgaggtcactttctatgattgtagtcagatcacatgaggctaaatattttttattgttttagttcatttcatagggcatgaggaaggaaaataaaaaacaaaacaccagtccctgaaagttcaaaggttcaaaattatcagatcagaatgtactgcataaatgttatgaagacttaatctacatctgaatatcgtcagatggtttgagtgatatcttaagtagaatgctggagtgtcaagtatcctgtaaaaataagacagacacctgttttataaattgtgattattcctccttagaagcaaaaaatgttggataaaatttgttagccccatcttgttctgagcttctgatcatctcatcagtgtgtgatgatcccacaaataagtcaatgtgctgtagtcaaaagcttaccacagaagagagagtgcttgaaacccagaaggtctgagtttaaatccaggcatgatgccttactactgggtgagcttggaacagctacatggatcccacaatcctccatttatgtaaaggcaaactgagatgatgatagctattttgcagtactttgtaaagattagaaatcatatatgtacacagaagtcttctgtgataaaaaagagaaatcctctatctaaagtgtatagcatgtagttgtaagcaatcaatacatggtggttgttattataactattcgtaacatggagaggcatagatagataggcaatttgggataatactgaatatgtgatatatccatttccaaaatatatgggtaatattggggtagatagaaacatttgagcaatactttatgagttgattccttctctgctttgtgcagatttttcagatggtacttacaaattgtttttagaagttaccttaacctattgacaccatgattttactagcttagttttgtttgatctggtcaaaagctagcatctttgtcttttgaagcacctcctatcccaaaaagcttctaaataattgagaagtgttcactttccaggtaaaatggagataaattaattaacttcaagtttgggcagtaaattgtcatgagtagtccatcattcttcctaaaataggcagaagggaggtgtctactgctgttgccaaaagttaacatctgaatttaacgtgaaccattaggggaggggctgataagagtccctcaagttatgggaagaggtagttttgcattgcttgtaaccagagtagtttgtgaagtcctgtaagcctccccaacttggtttctctcatcccagaggtaagttggttcattttacaaggcaactctaatcatttggtagtacctgctgggagccctgtatagaggaagctcgtgattcaaagcctagcccagcagaggtgtgtgatcaattgtcagtgcctgcatggacattgagatataggatgagatagtacagaacatggatttccacttccatgtctgagtgtggagtaccaacaggtcaccaattctaggaatttgggcagcaatgtgctttttgaatctgtagctgctacaactgccttatcacaatccaccattgcatgcctgaaataaaatgtaaactatactacattttcattgtgttgtcattctcccataagttcctttctcttgtccatcgtgcttatacagattatgattccccatttctccttactacatcaaattgccaaacacaaatgcagttacttcttttgtcacattcatgggagtggttaagtataattcctcatacttcatcaaatataactaatcagaatgcaccttatttaattatatacttaaaacttgtataataatgcttttcatattcaacacaagttgtccagattaattctgatgttgcttttaaaccatgaaaaaaaatgaggattgttcttgttctgggtggagattgaggatttaaaatgaaatcattactatatccatgtaagttaaaacttgaattcaaattctagccttgaattcatgccctacctttccttctatgatctctacacaatcagtggacatttatagcaaaccagttagctttgttcccaatcctcattttatggagtaaagaaaatacctctctgcaattttgagctatgcccctgatactcttcctgagaaaaacatgtatttgttatatctcccgttaagcccatctgctcacttgaataaagggaatattagtttgaagatacaattttctggtaattataggagacaaaggagtcattttgataatgtaaagagtcaacagaaattataattatattgagctttatgccaatttgtcctcatctaagatttcaggggaaaaaattgaaatgtctgctgtttggaataataaaagggggatttaatttaccaaaaaaaaaagtcaaacaaaacaaaccataattaaatttatttttagcttcaagatgatatggatattgaacagcgttaccaaaaccctgggagcttaggaaggataggtgaggatatcttcagttgccctgaataattggcagtctcacacttaaccaaatcagtttagacattcagatgaaatatccatctcctttccttttcttcttagaaacctggttactctgtttggttacccatattgatctagttaaccacctaattatcaaatatccactctattttatgctgtataatcttaaaaagcaatgttattggtagctcaaatccatgccctataatagttctgtgcttcatagtcacaggtgacccctcgaaatgtgtctgagaagatgtgactacaatgcgcacagaaaatgtgactaatgctgcactgagaagcctttgatttgcagcttcaggcactgtttatgaagtgccttatagactggaagtgccctgaagccttcactcccagccccttacaccatgctggccagtctgctgtggattgtttcactgtcaagaccatgccttttgaagatttgttgccatacatctttaaagcatttcgtttgtcttccctacttatcaattttataccatttcatctcaaactatagagccttttctaggtcctgtgctggctgttagtctcttcatttgctcagcccagcccagctgagctgaagaatgtcacccacccatcatcaggctatcaatctgggcacctttcaaaccctaaatgttaccaagtctttatttccacttaatgtaggtcccaagtgaaacaaacaaaagcaaacacatagcatttgtggtaatccagtcctcctaggaaaataaaattattcctgtgctactgtatataatctttattgagatacagagtaaggctggaatgccatctgactttgcgtgcttttggcatttgtggtagatattgctagtgctcgctaatattttctattctttgtcccctctggttttataagaggcaaacctccctgccccttggatgttccatatgagtgagcgacttactttagtcaatgaaatgtgagcaaagtgtggtgtatgactcttttggctggaagcgtttaagcactagcactcaattctccctactccctttctctgccacgatgaacactgaagtctcatgctgagatagtggcaacataaaatggatggcctagatggtcagataccacgtattagcacagctagagacacagcagactttttctgagtaagaaaggaacttttattttgttaagccactaagatttaagggtctattattaccacagtacaaccagcctatgaggattaatatagaattccagataacttgtaactgtttccaaaggggtagctggctctttagccctgtgaaaaattatgaaatggaaaagttcatttatatggttagattttgtgcccccacccaaatctcatcttgaattgtaatccccaaaatccctatgtgtcaagggtggaacctggtgagaggtgactggatcatgggggcagtttcctctgtgctgtcctcatgagaatgagtgagttctcacgagatctgatagtttcataaggggctcttccctcttcactcatctcttgcctgccaccatgtaaggtatgcctttgcttccctctcgccttttgccacgattgtaagtttcctgagccctcctcagcagtgcagaattgtgagtcaactaaacctcttttgtaaattacccagtctctgttatgtctttatagcagtctgagaatggactaatacactcattttttgtgttcttcacttccttttctgcactccttcccatctgcaagtagctagtgctgtagtgcagtttcccattatatcactccactagtagtctgacctctcctgtcagagtgctccaggctaccacatagcctttctttccataacatacagctaagatgtttatttccccattgtgcctatgctatggtctgaatgtttgtgtcccttcaaaattcatatgttaaaatcttaactgccaaggtgatgctattaggaggtggggcctttggaaggcaataaaattagcgtccttataaaagggaccccagagagatcccttgccccttccaccatgtgaagatacagtgagaagttgccatctgtatggaagcaggccgcccccagataccaaatctcccagcgtctcaatcttgaacttcccagcgtccagaatggtgagaaataaatgtatgttgtttataagccaccaagtttatggtattttattatagcagcctgaacagactaagacagcctgactttaaataagttaggaggatatccagcaattggcctcctccaactgtggaaccaagaagagtgtgcaccttactcatggtttctgtcttgtaagcagtaagccttggacaatatacatactttctcttagcccctatttcctgatccaaaaagttaggatatatatatcttataggaatgtcaaaaaaaaaaaaaaagaaagaaagaatggtctgaatttctttatcccttcacagttcaggttctagaaaatgtcatccgtactcactgcccttcgtttcttacttgcttttctgtcttcagctactcaaggttagatttctacccactggcaacctccaaaatcactaaacatgctctcactaaagttgagttatttactactgatcactcaatccagtagatacttcccagtctttattttgcaaaatctgtgtgacattcaacaactgactactccttcatacttgaaatgtattctttgacttttaaacacatttttctcatatttctctattatttctttcaaggaaacaaccgttcgtacctagtatttgctggtcattatagatgcaaacattaacagtaatataattgtgcccttaaaaggatcacagactgtgtggaaatagaacgcttaaacagttattaataatatagtgtgataattgcaattatagagatatacacagacaacaggggatgagtttcagaatgttttcctagataacctgaaacaaagtctagtaggagtgggaaaaatactctaggataaggcataaagcgtggcaaaggcctggagataaacaatatttctgtgtgtgaagagaaacttcttagagttaatcttttaggacaccccccctacacacacacacacacacacacacacacatttttttgtcccttgaatactggtattcccttgttccatctctggctctcatattgttgtatggtcatttgacccctgaagccaatattcctctctttattgttatcttccaaatctgtactctcaccaaagacctccctgtggaccctacacattcctatattcagctttctggtggactttgatacccaacatcccagttcagtgctttttctgcaacctcagaataaaacaacagtagtgattatccctgacaattatataagcactttataatttagaaagcactttggcatacattatctcaccagctgcttccttaatgtaatagcagcagtgggcaaaaaaccgtgtcactcccgacagctcttttctgaccttggtctcccagccccacctactaaaaacatgagagcatctggatgagagctgattagagcctggaagctgaccttgtgtggggaccaggggagcatgacagcagtagttgccacctccacaccttctccatctccataggggcaatagagcaagccagagatttcatggcagaatgcaggaggctacacagagcagcaaggcttctcatggcctgcctaagcagaggctgatgatggcaggcatcagcttgtgggaggttaagcacttatccactctccccccacttttctgatttctcatttcttccatgcattaactaccactttgaaagtttcagtgggttaattaaattcttctagtgttgatgctaagaaagctgaaacattttcaactgagattgacactactcaagacataggcttcactgatgtttgttcagtaacactccaatatgtcacaggattgccgagagaacatctgagagctataatgagctaaaagtcaagtacaggggaaaatgtgttccagactgctgcagatgttctcaaatcaaatcttatttctgtgaaatgccatatagaatattcagctgttgaaagatgcaacacgaaaggacagttcaattgatttgcactgtatttaaaaattttatgtagcctaaattatatgaaatggtttttcccacttttgaatcaattaataagagatgcacttgattctaatgagcttcaaggatgattttttggactaagaggtatgcattaggtggtttaggtaggagctaaggcttatagaacgtggcagttgaataagggaaataaggtatagttgagaaacagacattctctagacccactcccttgcccttattcttcctttatcgctttggcaccaaaatggagaagacttctgttgaatgaattcaccaagattctgataagtctatctgtgatactatgttgatagtgaatcattctgcccctcctgagaaacccaaaggaagcttacaggaggagatcaaggaaatgttttggcagatgcatctgttgtcataatcaacttatatgtcatcacacaggtgaccttgcacatcaccataattttggtagtctgtcctttgattgggaatagtattctcttacataaaggaaagcactgaacaagaactgacaacctaggtaaaagagagaaaaatgcttaggtgagattagaaagtacagtagaacactacaatgagatattacttcacaccccctagaatagctaatgttcaaaatactgaaaacataaatgttggcaaagatattgagcagcttgaaaattcatacattgctaatgagtatataaaatggtacaactactttggaaaactctccagcaatttcttgtaagacccaacaattctacttctaggtatctttccaggagaaatgaaagcacatatccataaggttttgaggtaattgaatctcacaaacatataaggaaaagaaaccagacacaaaagagcagttaccaaatgatttcatttatgtggagtttaaaatgggagtaacaaatccatattatttgaaatcaagacagaaattttctccagtaatatttttatcctatatctcaactggggtggtagttttgtgaatgtgtatatttgtctaaagtgtaactgtatacttaaaatgtgtgtatattataaatcctacatattataaatacattgttaatttttttaagaaatgcaaactcactctgaaagaaactataggataagcatttggtaatatttctatgacaaaataagatatatcatataagaaatactaaagacattttttatgcccaaattacttttaatcaggtagcctttgggaactaaaaaccttatgaagttaaccactggaaaagaatagctggtacctagataaaaatcttggctggaaaccagcttaaagaaaatgaatggctaggggcataaacaaatgcatttcactctgccaacttgccagcagctgggtgtggagttggaagacttccggcctttcacatcagggaggctggctaggacttagaaacagagaaggggcacatctgctccttgaggagtggagtaggtagtggatgtggtgtcacaactcaaaggagaagctgcttcttaaagatggaaaatttgattaggtcttttggtaggccttccatgtgctttgctttgtaggatcagccagtgcctgcagcctccgttaacaaaagctggccttgcctgaggccaaagcttccagaacagaaccttaaattgattgccgataggatattacatgcagggctggactcttttgccctaacgtcctacctacccttatacaaacaaacccagtgggaaatttgtctggaaactttaaatcaaatacatttctagtgttttaatatatgcattgacattttgtcttgtaatagcattattattaatggataataaaattataacatttatagaactgaaaacaaaacacttgaggttgaatttccattcactctgggtacactttgtgcattttgtagggcattagtattgcaaattggaaaagagtcaaaactgtactttcattctgctatttttgcattcaggatttctgcctttgtacttcctattatctaggatgcctctcctagaaaattgtgactggaaacaagtatcgcacatcttttctgaactcacataattctgacagattttgatttttggtactaattagaatttattttacatatccctgcctcagaaactttagtgtttggattttaatcatttaaataaacatctatgcatttaacatatattgagtattccatgccaggcactgcagtagttaattgagattgagtgattaataagataaactctttatcattgatgatcaattgttaaaaaaaaaatagtaataaactctaaatacttcacataattgtatataccttttgtgtgtgtattttatatatgcgtgtatatatatacacattatgtgtgtatatatatactcattttacatatatatgtacgtatatacacacatatatgtacgtacgtatatacacacatatatgtacgtatatacacacatatatgtatatatgtacatatatgtgtgcatatatacacatatatgtgtatatatgtgtgcatatatatgtacatatgtgtacatatatgtgtgcatatatatgtacatatgtgtgcatatatgtacatatatgtgtgcgcatatatgtacgtatatgtgtatatatgtacacatatatacacatatatatgtatacatgtgtacatatatacgtacatatgtgtatatatactcattttacaaaggtgaaaactgaggttaaagaggtttagatatttattagtggaagccggacgcaaacccaattctgtttattacaaacattgtgcccgtaaccattcaattaccactcctcaacataactgctattatgctatcggagttatggaattagaaggaaacaagtgtccatctcaacctagggcatcaggagcagttgggaggcaacagatgaactgagtcttgagggatgaaaacactgtaaggtttatgtaaatgtcctcattaattccattctataggcaatggctggctctggctaaatgatcatttgtgaaaattgctacatttttatttatagtagagaaagagttacaaatctgttggataattaattccttctcccgatagggcacaggcttcattcttagtttgtgcttttgggtgtcgttgtcatttagcataaatcctatcaaatctttgtgagtttcgcttttacatttccttcatctgtgacgagaagattctattagcaaccctggcaccttccattaaagtctacaacttccaactgccaggaagggataatgaagtgataaatttaatttgataccaaaatatggaaggcagagatatctaagtgaatttatagcattagctatgtctttcttcttagcattaacaaaagttttatggcaggttatcaaaatcagtgcaataaaaacaaattcatatgaattcccatacacagaaatcagatctatactttgtatcaaatcatgtctttccctcctcttagcatttttgggctcgtcagaacctaatatgagttttaagtattttattacttgaaggatgacaaaaaatactgttgatcagcttatgaagcattttttactcattaatgtatgtgtcctggagtttataaaatcgaaatctccttctccccactggctagagaccagagagcctacgaagaaagataacaccatcaccgatgcctacagttgtgacaatgagggcggttcaaattctgtgggatggaaaacccactttcacctggatttcttaactgtttgtatcatggtcgtaaacacaaaaattctttttgctcatttgcgtccttatactttgtctaaatactaacatttccacatcaagatccctttgttttagtgagctttatcttacacctttatctttatctttccatatgttagcattacaattaatattgctattctagttgcaggtgatgcctataaactgcacccatgaaatgcacagccaggctaagttctgctttttccatgcaatgatgtatgtgttcatcctataaaacagacacaactgttagaatcagtttatgagtacaaggttatttgcccaaggaaaagtagaattgataatcatgataatgacaatacaaattaaaaaccttcaatggttgttatttaacattttgagggctttttgtgttatctactttaatcttacaatgatttatgtaaggtatgaattattattctctatcctgttgagaaaaggaaggcttggagggattaggaagttgtcctaggtcccatgctggaaagagcagaggcagcattctggtcctggtctgtgtgctcacaaaacctccgcacttgcctactacattctaccacctctacttgttatcctgtccagagagaatcattgtttttaatgcttgggatttgattctgagttggcagagagcagattaagattttgctaatctgtgggcaagattgttgaacgttttacctctttcccagtgacctgtggcagtcagttgtagtagaaataatacaatacttactcacctgtattcagtgaacttaggataaattattgcttttgcaggcatgccaccttctttcctcaacctttcatcattggcatcaagccacattgccatcgtgggctgatccttaccatggaccttccgtttattggcaaagatcacaggtccaactcttcctccttctattctgcccatgtatgttatattacttgacttttagcttttctacaacaaatccaacttgggttatgactccatgtatttatttacatgcatatattttccctaccaatgccttaattaaactagtttttctagtctgttgattatgtctttgaaagtatttaagataggccatgcacggtggctcatgcctgtaatcccagcactctgggaggccgaggtttgtggatcatgaggtcaggagctcgaaccagcctgaccaacatggtgaaaccccatctctactaaaaatacaaaaattaactgggtgtggtggcttgagcctgtaatcccagctactcaggaggctgaggcaggagaatagcttgaacccaggaggcggaggttgcagtgagccaagatcacgccactgcactccagcctgggtgacagagcgggactctatctcaaaaaaaaaaaaaagaaatggaaagaagaaagtatttaagatagagacagccagagaataatgaagaagagaagaccttcagggaatggggagaaacctgatcctgaggtctgcatagatccctgcaaattgccttgttctccccagctttgggccttcccttcatcagctgcattgcctatgtagatgtgtatggttgcctggctgcatgcccagcaaactgttgatgtgaacattgccttctgtgtctcttcagtcgtgtcaatttcatataaaatcagctatctaggcagtaactgagtactcgaatgggcttcagattcccctgtggtaagcaaccttcaattggcttataattcttattactgtccagggtaccaggcaatgactgatttacacttaatagcaaggaaaaccctagatatacctgccaaggaccttagagtgtcctcatcacaactgcaggtgaagtttccattcatacagtccttactcaagcattgtaatgtatgcagttctgcagaggaccaagagaaaacttatgagggccatctgaaagtattctagatctgtatgtgggttatttcccctgcctttgtgatgctaatatattttctgtatgtatgcctgcatatttctccctggaagttccctagaggatacctagcctcatactcttgcaccaaagaagaattcccaggataatgatctaaatatttatctattccttagttatttattgagtgtcacaaggtataaataccatggttggggtgaagtgagatgaggcagtagaagggatgcaggtggagatggagagctccaaggatgtttctgagtgattccagtgtcatgagcatagaatgtcaacaatccaaggcagagcataagtgtgcatacagcaagagttacactaccagtcatcaacagggaggatttttgaagttttcatttattatgctaaatatgtatagaatgcagattaaaacaacatggctagttcagtagtgattaaatgtgacaggttgctagtagagtctattaaaagaggaaagtgtggaagtatttttgcagtgagctgagatcgcaccattgcactccaccctgggcaacaagagcaaaactccataacaaataaaataaaataaaataaaataaaataaaataaaaattaacccaatatatcaaaaaaatctaatcaattatcataggcatctggaagcacatcttcctactaagggcattttctctcaagtatttcgccttggaaagaaatgctccttctaagacaaaatgtaaagagaatgccaatttgtaaacatttggagttggaaagaaaagaatacattatggattactgatatcatcagtaaatattgactttttagaacactctgaagaaaatggtaatgattagaccattccatagagaagtaaatgtaaaactgtaaaatgtttataggtaacacaaagtaggtagaactattaatatttcaccaagaagaatcatcagtttgattattcttcttgagcaaaacagaatcactgctgggtgtagtggctcatgcctgtaatcccaacactttgagaggctgaggtgggtggatcacttgaggtcaggagttcgagactagcctggccagcatggtgaaaccccatctctacaaaaaaatacaaaaattaactgggcatggtggtgggtgcctgtaatcccagctacccaagagactgaggcaggagaattgcttgaacctgtgaggtggaggttgcagtgagctgcgatcatgccaatgcactgcagcctgggtgacagagtgagactctgtctcaaaaaaaaaaaaaaaattactaagtgggaattgaagccccttctctatatgagcaagcatagtcaggtgtagtgcctaatcacgttaaattcatttttatcaaagggtgaaaatgtgaattctgaaaatttctgaatattaaagttcaatttggtcatctagaatatatctaaactcattggttaaaaaaatctaaataaggaaaagtagcagtgttcctctggaagcaagatttgtctaaagcaatgtatgtgaatagggatagggagaatgaaaattcaatgagaataactcataccagatgaacatactgtcctcttttaatatgtttccaggcaatggataacaattttcacccaactcttactaaatattaataccttgcagtgggctttacttcagttacctcatttaaccctcagagcaatctgtgaagtaggtcttcctgatacctgtgctttaactgatgataaaacaagtggctcagctgagatttgaacccagacaacaggaaatgaaagcccaaattccaaaccattctacatccctcaatagagtgaagagctgctgccagcaaggcatatcttgctttctggaaggcatttgacagctgagtatgatagcctgttacacattgtggagaagattgttacttggatcacagagctagaaagcctcataatattctgatttccctaagaaaagcttaacttgtttggagaatatcacgcttaaaaaaagattttatgttcttagagttcctcagatttataattagaatctgtgaatatatgactggaataaaaactttaggtttatcatccactatagaaatctgtcatccaaactagaaaacattactccatcaggatatgttattttattaaaaataatgtacttatgactattaaatgagagtagttgacctctgaaagaaaggtctagaagttttcccaagattggtaataaagagctacaaacttgtgaattttagaaataactactttaaaatgcaggctctttactctttctaggctataatatacctttatgctatcagacaaaaagccctactttactaagtgaattattaatataaacacatttcaagaaattgtttaacctacttaagataattaacagctttcaagtacgctatcaaaactcacatgaaaatcaacaatgaatatgctgttttaaatgaatgtttgttagcaattcttcccattggatgtacctgaaaaaaatgcatttctttcccaataatctgtaattcagtcttttcaccaattcaaaatgactcttcacacaattcatccacgttagtgcatttttgctgtagacttttgtagaatatagaaagcatcctactccctgtggatataatttgatctcagttatatagtcattttctcattctgtctgcctctaccaggaatttttcattagttgcttactgatcttactctagagactcaaagtaattatgtccaagaattgtacagtgtcaagaagtggtaactttcaggaaaaggagtgatatgtgctttaatttttaaatctaatgccagcacactaaataaaatcgagagagtatatgaatatgaggtagctattccatggaagtatatattgtgctcttcctatgtccaaaataattttaaactacactaaaacttttgaaaaatgtacacttttaatgggatatcttctgaaaggctttgaaagaacaagatttcccaccaggaaaactgaaatataaatctattcatgaagaatctcttctaaagcagaatctcatattttttataaatctaaactttggctataaaaaaaattcctatttctgaatttagcattaatatactctctgaagtgattaacaacattagtggtaatacaaactattgaaaataaaataaaaatattttccaaaatgctcaaataatatggtactttgataatattcctgtatctgcattaaattctgcttttttaaactttgaaatataagtatagggccatctggcaagtttggcaattcttgcttatgtctggagaactcataacataaaatataatttctggcacataaaagcatttatacctctgaattaagagaaggggaagtgtggaaggaataggtagctgtgtcggtcagctgccaagggctgaagggaaggtaaagataaaccattagttgtcttaaggaaatcttaaaagaaaagttaatttttcccatttgtatgacacctaagctttactgtacagtgttacttttttcatgttaatgtttttaaaacttttattttagtacatgtgcaggtttgtcatataggtaaactcatgtcatgggggccccttttacagattattttgtcacacaggtactagtcctagtacccaatagttattttttctgattatctgttttctcccacccctcactctcagtaggtcccagtgtgtctgttcccttctttgtgttcctgtgttctcattctttagctcccacttatgagtgagaacatgcagtgtttagttttctaaagataacggcctccagctccatccatgttcctgcacaggacatgatctcattctttgttatggctacatagtattccatggtgtatatgtaccatattttctttatctaatctgccattgatgggcatttaggttgatttaatgactttgctattgtaaatagtgttgtaatgaacataccttatgtggacacgtatctttatggtaggtagaataatttatattcttttgggtataaacccagtaatgggattgctgggttgaatggtagttcttttttaagccctttgaagaatttccacattgctttccacaatggttaaactaattgacactcacaccaacagtgtataagtgttctcttttctctgcaacttggccagtgtctgctattttttttttaactttttaatagtagtcattctgactgatgtgagatggtttctcaatgtggttttgatttgcatttatctaatgatcagaaatattgagctttgttttcatatacttgttggccacatgtgtgtcttcttttgtgaagtgtttgttcatgtattttgcccacttattaaggggttgttacttctttcttgtaatttgtttaagttccttattgattcaggatattagatctttgttcgatacatagtttgcaaatattttctcccattctgtaggttttctgtttactctgttgacattctctttttctgtgcagaagctcttaagtttaattagttcccatttgtcagttcttgcttttgttgcaattgcttttggaagcttcgtcatgaaatctttgcccattcctgtatctagaatggtgttgtctaggttgtcatccagcgtttttatagagttttacatttaagtcttcaatccatcttaagttgatttttgtatatggtaaggaaggggtccaattttaatcttctgcatatggctagccatttatctcagcatcatttatcgaacagggagtcttttccccattgcttgtttttgtcagctttgttgatgattagttggttgtaggtgtgcagccttatttctgggcttatattccattttattggtctgtgtgtctgtttttgtaccagtaccatgctgttttggttactgtagcccctgtagtatagtttagagtcaggtaacttgatgcttccagctttgttctttttgcttaggattgccttggctaattgggctctttttcagttccatatgaactttgaaatagttttctctagttctgtgaagaatatcattgataatttaataggaatagcattgaatctgtacattgtggctgggcgcagtggctcacacctgtaatcccagcactttgggaggcctaggcaggtggatcacgaggtcagcagatcgagaccatcctggctaacatggtgaaaccgcatctctactaaaaatacaaaaaaaaaaaaagaatctgtacgttgttttgggcacttggtcattttaataacattgattcctcctgtccacgagcatggaatgttttcccgtttgtttgtgtcatctctgatttatttgagcagtgttttataatcctcattgtagcgatctttcacgtccatggttagctattcctaggtattttattctttttgtgacaattgtgaatgggattgccttcctgatatggctcttggcttggctgttgttggtgtgtaggaatgcttgtgatttttgtgcattaattttgtattccaaaactttgcagaagaggtttatcagctgaaggaacttttggggcaagactatgaggttttctagatatagaatcatgtcatctgcaaacagtgatagtttcacttcctctcttcccatctgggtgcccagtatttctttctcttgcctaattgctctggccgggtattccagtaccatgttgaataggagtggtgagagggggcatccttgacttgtgctggttttcaaggggaatgctgtcagcttttgccctttcagtatgatattggctgtgggtttgtcatatatggatcttattattttgagctgtgttccttcaatacctagtttattgagagttttaaacataaagggaagtagaattttatcaaagaccttttctgcatctattgagataatcatgtggtttttatctttagttctgtttatgtgatgaatcacatttattgatttacatatgttgaaacaaccttgcaccccagggataaagcctacttggtcatggtgaattaacttcttgatgcacttctgaatttggtttgccagtattttgttgaagaatttagcatcagtgttcatcaaggatattggcctgaagttttctttattttttactacacaacttttcaacttgccatttttccttaatgattgaactctatgaaccaaaaataagtgaataccagaaagttgtctctcaatcttgtttctaaaagagggtgctgtggtttgaatgaccacatcccctgtaaaactgatgtcaaaacttaatccccagagcatcagtagtaagagatgtggtctttggaaggtaattaagtcatgagggctccaaactcatgaatgagattagcacccttatgaaagggtttgagggtgaagggaacactttcttgcccttctgacccttccacaaagtgaggacagagcattcatttctctggaggatgcagcaacaaggcgctatctagaaagcagaaaccaaactcccaataccaaacctgccagcactttgatcttggacttcacagcctccagaactgagacaaaaacattctgttgtttagaaattacccagtctgtaccattttttatagcagcacaaatggactaagacagaggatcatcctattagtttctgatattgttcacaggaaactatgtgttgatttgggtagtagattgttttctttccatttggaaaagcacctcaactacatatagtttaaacttcatgttgaaaagtgtctgttcatgtccttcacccactttttgatggggttgtttgtttttttcttgtaaatttgttggagttcattgtagattctggatattagccctttgtcagataagtaggttgcgaaaattttctcccattttgtaggtcgcctgtttactctgatggtagtttcttttgctgtgcagaagctctttagtttaattagatcccatttgtcaattttggcttttgttgccattgcttttggtgttttagacatgaagtccttgcccatgcctatgtcctgaatggtaatgcctaggttttcttctagggtttttatggttttaggtctaacgtttaagtctttaatccatcttgaattaatttttgtataaggtgtaaggaagagatccagtttcagctttctacatatggctagccagttttcccagcaccatttattaaatagggaatcctttccccattgcttgtttttctcaggtttgtcaaagatcagatagttgtagatatgtggcgttatttctgagggttctgttctgttccattgatctatatctctgttttggtaccagtaccatgctgttttggttactgtagccttgtactatagtttgaagtcaggtagcatgatgcctccagctttgttcttttggcttaggattgacttggtgatgcgggctcttttttggttccatatgaactttaaagtagttttttccaattctgtgaagaaagtcattggtagcttgatggggatggcattgaatctataaattaccttgggcagtatggccattttcatgatactaattcttcctacccatgagcatggaatgttcttccatctctttgtatcctcttttatttcattgagcagtggtttgtagttctccttgaagaggtccttcacgtcccttgtaagttggattcctaggtatttttttctctttgaagcaattgtgaatgggagttcactcatgatttggctctctgtttgtctgttattggtgtataagaatgcatcagagaaatgcaaatcaaaaccacaatgagataccatctcacaccagttagaatggcaatcattaaaaagtcagtaaacaacaggtgctggagaggatgtggacaaataggaacacttttacactgttggtgggactgtaaactagttcaaccactgtggaagtcagtgtggcgattcctcagggacctagaactagaaataccatttgacccagccatcccattactgggtatatacccaaaggactataaatcatgctgctataaagacacatgcacacgtatgtttattgcggctctattcacaatagcaaagacttggaaccaacccaaatgtccaacaatgatagactggattaaaaaaatgtggcacatatacaccatggaatactatgtagccataaaaaatggtgagttcatgtcctttgtagggacatggatgaaattggaaatcatcattctcagtaaactatcgcaaggacaaaaaaccaaacaccccatgttctcactcataggtgggaattgaacaatgagaacacatggacacaggaaggggaacatcacactctggggactgttgtggggtggggggaggggggagggatagcattaggagatatacctaatgctaaatgacaagttaatgggtgcagcacaccagcatggcacatgtatacatatgtaactaacctgtacattgtgcacatgtaccctaaaacttaaagtataataataataaaattaaattaaatttaaaaaagacttcatgttgaattaaaagtgaagtaggataatgtctctgtatattccaagtatatttatggctgtttgttgattggcttagaaatacccacagctccgttatgattgctgatgcttttagacggtgagaactctttataaagggtcctaatgtattagaacattgatattgttgttttacttgtatcagtatggtagaatgatgggttgcattgccccacagagtttccaggctgttttctgtgacagagcttttaacattaaaaatgaaaacattcaacaatagtggtatatatagtcaggctgtttgagacattccctgtaactgtgtaagacactttatttaagggaaaaatccttgaagaaattaattggtatgagccagaagttgtttggccgatttaatcgctaatctgctgttgtttctaaattgaatgagatccagaaggaagtctgcctgcttccaaatcagccaattcaagatatgtgtgcaggatggagttagaccactgtatgctaaaacgccggctcaaaattaagcaggctttgctatggttggggatgagggagtgattagccaagttttaaacatgctaattcacttttcagggcattttgccaagttaactaaggctatcctgaaactacttgaaaaattaactcaagaataaatagtgaccaggcctgaatttctgttttcaaaatttgttaagaactgaactttgaaaaataaatcagtaagtaaagtaaggcttttattcagatatcacattatggaatcccagtcatagtacagtctcttgtggatgaagtaaacaatttaggttgtacactttctgctccccactgactagttctatgtgtaaggctgtcctgttctctttgaaattcaatctatgtgacaataagagaaattttaagtaccaatgaaattgtaattgattttaaaccctgggaactagaggggggctaatagcagagggtaaatctcttacaatccttctattcaaagagttgcttatctctcatcatcgaacacccccttacttggccttcaaaattctgctggactctctaatctcacatttttcaggtagtatattaacgagttgttcattttcaattttcttatcagtactacagaaaagatacagtgttagtttagttaaggatggtataaccaacattctattatggagagcttaggggaaaatattccatcttgcatttcaagtgtagcttcccattctactgaaatattctgaaaggataagaaagaaaagttgtctttgttgttgtttttctttttcacctatttttataaaataattttctgctttaattccatgtcctttaaataagaattgttctaaaattatcttggaaggcccaccacaacactatatagaaattgttggtgaattagttgaatatataacactgtaaatataaaactattggttattacaatgactcttgacccaaacagtaaaacactatgtcttcctaatgatgattgtatcctaatgataatagtatcagtaagaaagattttatccttcatctttctctacgataaaagaaaagaaggacaggagagagggaaggagggagagaagaagacaaggaaggagggagataagggaggaagatgaaatcataggatttatttagcggcatagtaactgaataatcatatgtctgttttgttatttaatggataaatttattcctttaatattcctatttaacattctaataataagattaaaaggaacagaatgtatttctaattaatttttgttattttcccattttttcatatctccttagctacagttttctacaaacataccacaaattcagtctcaaaattgccccctgaatagtttctgcaacttacttcctacatattattaaaatgttagaaacctttatttatctaccttaagcttctgtgggtttcttaaactggtaaatgtatggtttgtgggtttatttttttaccaagtttaggaaatatttagtcattatttctctaaatagtttttctgtttcattctttcttcctcttttctgagactccaaatgaatatatattagaacttcaaagattgttccacaagtcccagatgttcttttaatttttttaatagtttctctgtttttcagattggacaatttctatttatccatgttcaagttcactgagtctttcctctcataccatctccattatgctgttaagcctacctaatgaactttttattttagtatcacatcttttaaatctagaatttctttttgcttcatttttctcatttattactttgccatatttattatctcatcattcattatcagagtattttactttatattctgagcacagttataataactgacttaaaatccttgacctctaattctaatatctggatcatctcaggactgatccctgttgattgcccttcattttgagagcagtcaaaatgctctttcctatgtctgacaattttatattgtatctggactgtgtaaatgatacattatacagagactctggactctccacacctaagagtcccgatttttgtttgctttagcagacaattaacttatcttaatgcaaaccccaaaactctgccccttctgcagttagcaactgactgaaatatctgtacagttatttcaatcttagctgtgctgcttggcatctgccaagcacatgcatagctcagatgtcagccagtgatttgggtagaatacatatgcagaatctggtgctccctctctgtagctttctttcttggatatctccccagtttctagatgttttgatggccccaactctgatttctcagccagttagaagacgaatttctctctgaattttaacctccctgcttggtaccaccccctgagcctgttctcaggcaaaaagaatagtgtcattcccttcttccaggtgccaattcccctttagtttctgccctcttttggacattcttcagtgcatttggatagagtgtgtgtgtgtgtgtgtgtgtgtgtgtgtgtgtgtgtgtgtgtgtgtgtgtctggtgagttatctgcaggagaagcccaaaggaggtattctgccattaccagaagttgaaatcttcaaaaatcatctatcataaataaaaatatgaagaatccttctagaaagagcattcacctagatataaaactttttcatattgcaaactagtaaaatttgaagacttaaatgttttttgctgttgtttttaaattcccatcctgtgtactgccatcgctaaatcagagtaatgaattcactggttgtgagcaacttgacatgatttgtagaagcacaaaaagccctggggaattggacttggtactgctcacttttaagctaataaagagaaaaccctacaatcaaatgcagtgaagggtataattggtgcaatactacttgctatcagtgtacttttcagggtcatttttgttaactgaggaatgaagtaaaacatttttaagcacccagtacttcaacaagaatatatatggttaccctaagcagtcaagtccaaatatgtgatgcctgattattatagaagtacctattcagcattgctcattgtaaagaatcttattctttagttgcagatatatatcacctgaaatcaagccacatctggaaaatatatcacttttagctccatgtaccattaagggtgaataaaagtgtcaaaagtaaaggagagcttatacacatattacaggtatgggaatgtcggtacaacttgaaaatatatccatcaagagttgtattccacagaaattgaaatatttcagaagcaatactctattgtgtgccatggaatacatatttcctgagtctagagaaatttcaagcctccttttttctgtcgcatatgttctggctgatgccttataatcattgcttccccattcagtcaccatggaaatgagaaggactttgttgtcttggatagagaactgacttaataataggaaactccatatagggataactgggcatttgtgttcctcaggggtcggtaataaaacccatcttatttgaggaataaaatcccacataagtagataagtcttcccaataagaaaaaggcaagatgatggtaatacactgaaaagggatctctaaaactgtgtgcatgggcagaaaaggtgatgtgtgtatgagtgtgtgcaaacactaggtgatataacttattaccaagaaggggtttttttaattttattttattattattatactttaagttttagggtacatgtgcacaatgtgcaggttagttacatatgtatacatgtgccatgctggtgtgctgcacccattaactcgtcatttagcattaggtatatctcctaatgctatcctcccccctccccccaccccacaacagtccccagagtgtgatgttccccttcctgtgtccatgtgttctcattgttcaattcccacctatgagtgagaatatgcggtgtttggttttttgttcttgcgatagtttactgagaatgatgatttccaatttcatccatgtccctacaaaggacatgaactcatcattttttatggctgcatagtattccatggtgtatatgtgccacatttttttaatccagtctatcattgttggacatttgggttggttccaagtctttgctattgtgaatagagccacaataaacatacgtgtgcatgtgtctttatagcagcatgatttatagtcctttgggtatatacccagtaatgggatggctgggtcaaatggtatttctagttctaggtccctgaggaatagccacactgacttccacagtggttgaactagtttacagtcccaccaacagtgtaaaagtgtacctatttgtccacatcctctccagcacctgttgtttactgactttttaatgattgccattctaactggtgtgggatggtatctcattgtggttttgatttgcatttctccgatggccagtgatggtgagcattttttcatgtgctttttggctgcataaatgtcttcttttgagaagtgtctgttcatgtcctttgcccactttttgatggggttgtttgtttttttcttgtaaatttgtttgagttcattgtagattctggatattagccctttgtcagatgagtaggttgcgaaaattttctcccattttgtaggttgcctgtttactctgatggtagtttctttaaagaatgcagtttgtatttttctatcagaatggaaccctggaggctaaagaagggaaaatcaagctcctgtctccttcttaggtattattaaagtgagattctctaatccaaggtaaaaaaaatttattcatttcaaataactacagatttaaaaattttccatcactaaaaatataaacattttatttaaaacattatttgaaatcaatcaagttatttatttgtaccaactggaattatctagatcaatgctactcacaacatggtacccaaaccagcaacatcagcatcatcaccagaggttgttgaaaaatgcagaatctcaggcccaactccacagctatggaatcacaatctgcattttaaaaagatccccaggtgattgatatgtaggtttaagtttgagaagtactagaacagataatacaataaaataaaatctcaatgtaagaagcatctcatctgtcttatttagtgagaccgttggaaagtgagatcaaaagaacactaaggaaatttgtagttggctataatttgggaactactttcaattctcagaaaaaagataactagcacaaaagaatctaaagaggttacaaagaagaaagaagaaatgaaatgaaacttgggtaaatgtaagatatgaatctgtgaaataataatatcaaataaggcatttaatagacacaatttagaaagcagtattatcaggagacctagggctgggatgaaagtgaagaacaaattatagtaaaatcaggctttcagtgtattaggataataaaaacaactaatgcaatttggggcttcctatccagagacaaatcatggaagagtcagataatagttcttttttaatgactcgagtgaaaattcagagagaatatttggacacaaaagcagaagagctctggtttcatacagaatccagggaacaacaggttataacatttgatagatgaaaagaactatgaatagtgtaaatgatgattccaaagtcagacttatgacaacacttggaaatatgaaatgtgaaaagcctttgattttaggaggcatgaaatttgaagtatagtagtgaaatcaaatagaaaaaatatgtcctgaatattaacacacattccacatatttaatagcagcaagcccaagtctgtctgctcaactattcaggccacatatacgttccctgcaaagaggaaataaccagttgtaactgactcctcaccccaccaccgggtcttgagaaaagttcagacagcctttatagctctaccttgcttcatttttgcaatgacacaagtaaaacacattaacttacttagggtgagtacacctatcatgtatgctacctagacacgtgtttttgtttttatttttaatttattttttatttcaataggttttgggaggacaggtggtgtttggttacaagaataagttctttagtggtgatttctgagatgttggtgtgtccatcacccaagcagtgtacacttaccaatgtgtacccaacgtgtagtcatttatccctcacccccctctcaccccttcccctaagcccacattatatcaatcttttttttttttttttgagatggagtctcactttgttgcccaggagggcagtggcgcaatctttgctgactgcaacatcaacccctcagtagctgggactacaggagtgcgctactatgcctggctaataacatggctaatggtttcgcctgttgaccaggctggtcttcaaccctggcctccagtaatgtacccacctcaacctcccaaagtgctgggattacagtcgtgagccactgtgcctggccccactgtatcattcttattcctttgcatcatcatagcttagcccccaattatcagtgagaacataagatgtttggttttccattcctgaattatttcacttagaataatagtcagttccatctggcttgctacaaatgccattatttcattcctttttatggctgagtagtattccatgatgtatatttaccacgttttctttatccactcattgattgatgggcatttgggctggctctgtatttttgcaattgcaaattctgctgctataaacatggttgtgcaagtatctttttcgtatgatgacttcttttcttctgggtagatacccattagtgggattgctggatcaaatggtagatctacttttagttctttaaggaatctacacactgttttccatagtcgttgtactagtttacattcctaccaacagtgcaaaagtgttcccttttcatcacatcacgatatccacgccaacatcttttttttttttttttgatcatggccattcttgcaggagtgaggtggttttgtgttatggttttgatttgcatttccctgataattaatgatgctgagcatttttccatatgcttgttggccatttgttttcagaattgtcttttcatgtccttagcccacttttggatgggattgtttatttttttcttgatgatttgtttcagttctttgtagcttctggacattagtccttcgttggatgtatagatcatgaagattttctcccattctgtgggttgtctgttaactctgctgattatttcttttgctatacaggaagtttttagtctaattaagtctcatctattatctttgtttttgttgcatttgcttttgggtgcttggtcatgaagtctttgcctaagccaatgtctagaaggttttttttaatgtcaccttctagaacttatatggcttcaggtcttagatttaagtctttgatccatcttgagttgatttttgtgtaaggtgagagatgaagatccagtttccttcttctacatgtggcttgccaattatcccagcaccatttgttgaataggatagacacgtttttaatactgtcctcgccatgttctcctggggctatagagccagacctaaagttgcacgtcatgccaggtcatcatattgctcatgaacaagatcatgtggaagggagtgtggatgcagctgttattctctttttccccatctgaacctaaatcctgttcctttggatagcaattcagctcattaggttctagactagtttcagtatagtagtaatggaaaaaagtatgatgttatcagctatactcatattaagctacagagaatactgcagttttgccttgaccaaagaatgcctctactagatgaaaatcagaacttaaagtacaagtaaataaataggtgattacaaaagactcttacattttagaaggcttctccatagagccccttttaaaaaaatgaactcctctagtgtttttaagtgttttacagaccattaactacatggcagaggggcaatgagaagggatttctaaatttaatgaactaggacacactcaaattgaggacagataaaaataagacaagttatatttaaaattctactttatcagtgggaaaacgcaaccatgaaaaccatctaaacataaacttgaaaagtattcagttctcaggtatgctatacctgagagagtgacaacttgatgaaaacattgatgatgataatattgtataaatatgataattatatatatcaatatattagtctacagaatatatacagcaatatctacatgtgtgccttgcatatatatgttatatacaatagatataagtactatatatggtatattttaaaaattattaaatatgggtatctgtgtatttttacgtgacattaatattataatttaatagatatatttatagatattaactatatctgcatgtatttgtgtatatattcaatgtgtttatgtaagtgtgtgtgtgtgtgtgtgtgtgtgtgtgtgtatgtgattcagccatcacctaacaaagtggaggcatcattcaaacttcgcacctttgcattttacacctagatttaatactgacattgactgcaaatctcactccacagaatacaaaataacccaattgtccattcattcccagctcttgaactcttaaatctcgtttagatatggtttaaaccaggaaataaattagccacatccgtagaaactttggctataattgcctagtgtatttttccactagtagtgtttgaaatgcttcctatgaagtaaatgctttacaaaggtagcagaaggagattcctgaaaatagtagtgtaaatggccttgactgcattttgataggaaacttcaagccatgttgattaatacattatccataaaattaaaccagcctagaaaaggttaatttttaaataactgtaatgttaatgtaatacttatttttgatgaggacaggctgaagagagcttaataaaatatactagacaaattcagataatatactacttcaaaactgttccatgaataactttccatttttaaattcttctatggaatagtagagtatgaccattagtatgtttttaatttaaaatgcattttggaacatattaacagtaaaattgaaagaacagggatttgaagatttggattctgtctgtattaatagctgattgcatagtaccagataatctttctttttctcttcttttctttcattttttaatttttttatttttttatttttttatttttgagacagactttcactcttgtagcccaggctggagtgcaatggcacaatctcggctcactgcaaattccgcctcccaggttcaatcgattgtcctgcctcagcctgccgagtagctgggattacaggcgcccaccaccatgcctggctaatttttgtatttttagtagagacggggatttcaccatgttgaccaggttggtctcgaactcctgacctcaggtgatctgcctgcctcggcctcccaaagtgctgggattacaggcatgagccactgcacccagccccactgcacccagccccagataatctttctgattcttgattttctcatctagagactggagataattcagtcttcccagttgacttcacagcactgttgtaaagaatcaaaagagctcatatatatgtacgattatatctgtataatctctatatatgttctcaaatacagtaaggtatatgtaaatatatgtaaagtattttaatgtttctacagttttaatgttttaaaaggaacacatttcatagaagaatgttacgagaaggtaatgatttctcattttgaacataagatagctggatttgatatcagtattaatttttattgggtattgacttagctttgcttatcttataacaagaggccataatccaagcatagtttattccattgactttattactttatcaaagctagtaattacacttctggtgtttccagaccaacaacaaaaacaattgaacataatgcaatgaatattgcaatgaaaaacatttgtcattataatgtactagaattccaggaagatgcaatatattctatttgtgtgtagtttcttataaacagccttagttctatttgaagctaaagaagaacaggatggttagtttcaatatgttaacagctccttctctttaagtaaaatagaaaatggaaaagagaaggacctagaaagaagcatgtctcactccatccagaagtcatgaaagcagatgatgcagtgatgtacctagctctgaggtcctcttttgtataagagaaataaatattcatatatacagtatatctgagaagagggcttcttcagaggagaacccagagagagcccagtgcccacaagaaaatgcctgggtgagcttattatagttctggttgcccaagcaaattatattttacctacgtgaaaataatagtaatagtgagaaaaatgttcttgaacatttgaatggtgctttcattcattcatttattcatccatccagcaaatgtttattaagcacctactgtgaagtaggcaatgtgctaaacattgtcatactgtagcgaagaagagagactggtccttgttctcttggagattacaagctaatcatggacagaaactattttagttttttttttttaagatacagtgtgtactaaacatttgcaggaggaaaaggcatgcttagaagaaaaatagagaatgtggagctactttaatttgggtatcagggaagcgttctgtgagaaagagatatttggaatgatatgtgaaggatgaggagccagggaacagcgttccactggtgagagtagcatttgtgaaggtgtgcaaaaacctgaaggacggcctttgtggcacaagttagagaaaaaaagaggaagtaacgccacatggtattagaaaggttgacaatggccacattatgtggaggctcgttgaccatgacaaagaatttggattttattaaatgtgcaaagggaaactgccaaatggttttacacagaaatggtgaaaatatacaaatacatcgtaatgttactatgtgaaaatatataggaaatgtgatgcaatgaagttacagacatcattatgaggtggttagcagaattggctttgtgggtatgcaatctgtgccatagcacaaagcttccctctcagaaggtcctgctcttggattaatgctctgacaactccatcttgaaattcataataatttttaaactgggaggcttggatttttacttttcattgggtccccaaattatgtagctaatactgtctactatagaaatcgagttgcaagatgatgttataaactaggataatgacactggagaaagacaaaagttatcagctggacgcggtgagtcaggcttgtaatcctagcactttgggaggctgagatgggcagatcacctgaggtcaggagtttgaggccagcctggccaacatggtgaaaccctgtctctactaaaaatacaaaaattagctgggcgtggcagtgcatgcctgtaatcccagctacttgggatgttgaggcaggagaatccacttgaacccaggaggcagagtttgcagtgagccaagatcatgccactgcactccagcgtgggtgacagagcgagactctgttacaaaaaaataaaaaaagttatctctatttcacaagtgaaacacagctataattctgtatcagattgccagtaatatgggctttcaatttggtccaagtagagcattttaattgtttactcaatcctaacttatgataatcaacacatattacatccatttagtaaatactagttttcaaaagattgctaatttttgtcatcttctgttagtgcatctgcatgttatgtatgtacaatagagattaattccaaagggcgtgaaacatttacctttacctttccatttcattaatatctatcaagcccaaagcgtacaaaagactctgttgtaaacttagagtgatgcaggtattttctattaagagcttataactgagttgaaagttaagatctaaatagctataatacaagaaaggatatacttgtaaaggagatacaaacaatgaactgtaagatttttcgtttctttagaagaatcattagaagttttatcaagtgtttctgcttatttaatcacaggagttcaaagatgtttgtcgtgacaccagaatgtgggatgacattattatgacatttcattttaattaaaactagatattgccagggattccatagtaggtatctcccaatatgtagtaatccataagattgtcatggtatgtatgaaaatcccatttagaagataaatattattgaggtctttaaagaaaaaaacttcaaaatgcctctccttatttcctgcagaatgaaatagatctataattaaaataattcttagtattcatcatcagagttgaaaaataaaatcagacttttgattcctagatggaaatctattaagagataaatgaaaatattgtggttgctgcacaagacatctgtcttcagtttaagctgcacaaactgcaagcaaatgtggatgttttctctatagtatggaactttcatcagggaaaagcctagtttgatgatgaaatttcaaagcagatatcccaaaagaacacacacaccccccccacacacacacacacaccctacacatacaccaaacagaagaacacatgggcaatggagggatataccagtgccccagagacagagacctctggcactaaagagctgttcttgtcatgcatgacagcttaaggctccagacatttcatcccaggacatttgttacagttgcaggcttccataattcaggctgtgggcagagtttctagcttatatctcccgagacctactcagggatctggtttgccttgcacttatctcccttctcaaacctgtgcctctacaataaagtagtcatgtatctatccaaagtgcacacactttgtaacttagggtaaaagaaaatgcttaccaacttaggctataccaagttgtataaaccaatattgcactcaccctcttgattctacccattctcaaagtacagtaaaagagagctattactcgctccacaatcactgagcctgacatgatgcacagaagagtttaacatgaaaataagatggactgatgggctaaggacgtagaggacattgagaagattttatacaacttgagaaatatgtgtaagtcttacagttgggatatttaggaaaaggaaggagcattttggatagtcttatctttatctcaaatatcaatatcctggtttaggcttttaggaccactcttctgcgctataactgtagactttcttctcccagcttctccttctccagaccctttacatatcactgccagtttattttttccaaagcttattttctgattcagagcattcagtgatacttcttgaccaacaaatgtaagggattctttcatctggcattcaaggctgtttgtgatctccctgcaacctattttgccagttttttgtttgtttgttcgtttgtttgtttgtttgttttttgagacagagtctcactctgtcaccaggctggagtcagtggcgcgatctcagctcactgcaatctctgcctcctgagttcaggcgattcttctcctgcctcagcctcctgagtagctgggactacgagcatgcccccatgcccagctaatttttgtagtttcagaagagacagcgtttcaccatgttggccaggatggtctccatctcttgacctcatggtccactggcctcggcctcccaaagtgctgggattacaggcgtgagccactgcacctggcctattttgtcagtcttacttttgttacttccttccatgtaaattatctttcagtaaagtggttttcaaacatgctctcctccttcctataacagcctcaatacattggctcatggcatgcagttcttctgactctttattttccttgccattgaaattctactaattctcacctaccccaggaagctttgtttatttttcccactggatatatttatctcctctaaactaagaaagcatctattttatacatatattcatatttaccatccaaatccacatttatttgagtaattgtacttggttttacccatctttctactgcagccccaattataaataccatatggaccatacttttatatgtctctgtctcacatcatgcctcctgatcacacacacaaaaaaggttccgtaaggtttaaaaaatggctagaaaagaatggaagagtattctccgtattcttagatttaacaatcattttatttccatccagaccttatggaaagtccattggctgaaaacagaacagacaaacaaacaaacaaataaccctgaatgtttcatagagactgcccagaataacaggatgtattgtatggcctttggacatggtgtgcttcctttacatttgccaattcaagagcttatggttgggatgatcatataggccagtttgtctctgacagtcttgctttttgtgcctgtaattatcgataatatcttcccttcactctcaaaagagttctggtttagatgagaaagtatatggtcactctccctaaggaccatttttatgggcaagtgaaaatactctctctacttgtcaacattgtattagttttcttatacaaactattaatattatagaactgggatagattagcatctcacccatttcttcccaaagctttaggttcatctaaaaagcaaataaatcaacagacagacaaaaaagcaaaaataaacaaacagaaaaacaaacaacaaaacaagtcccaaaggctaagccatttgaagtagaaaaggataaaacataaggcttaggatcattgggagagatatttttttctcctcctttttcccttttctctcccaggaattcttcagtagactcaattgaagccttgagtttgaggttttgtattctcagatggtaagcacacctattaaaaaagcaatgtattcatgttaactccctggcaccagcagggcctgtgtattcactgctagcagtggacaccatgccaggagaacctgactcctggtgcaaaaggattaggaaaaaaaaaaaagtcaaacaatgccaaaaaaaaaaaaaaaaacccacacaattcttttctgtactctgtggtttgttttacttaggaaaacggcctggttataccctgcagcacgcattcattacagtgatctttgactggcagatgcagagtaataggatgcatattttagtgcttattataataccctgtccaaaaacaacttgacaaatttgtgatttcgacaatatctcattttgctggctgcagtgctctgtgattgtctggcccacgtggcttccagattatgcataccaccaatacttctcattaaaatggccacagttcaccagtttcggtagcttggaacgaacttggaatgaattattatacaacaaagaggctgctgtcatgcagaacaaaagacaagcaaaagagagctttggcttaatgaggctaagtgagtgtctcccctgcatcacagctacttgacggcctttgagcatggattttttttctccacaggccaaaacctttggtctattattttgtgtttatgcaccttgaggctaatatacattttaatatgctgcacatggagaaaaaaaatcaaccattagattagaacatgtgcactccctgttaaattaatgacaaccgaacatagagataaatttaggttttcatatttaattatagcacactgcagtacgtttagcaaggataaattgcactattattatgcttcattttttttgacatcttctcctattagtagtgcacacttgccccagcaccaccaccaccatcaccctgtggccatgctaacatctctgcatatcttccttttctccacatcacacaatctcagccaccacgttgaaaggtatactgttttatttgcaagatttagtgagagaactgatgccattttggcagttctgtgtgcataagaaagtgatttgtaagaaaaaaataaatcagctaagaataattgttatcactcttccttgctgcatcagattatagtgatgggatcaagttcactgcttttctgatcaaccaaaagcacaaagcacagcatgtgactctgaatagttggtgtttcattatgactcagatgacctgtgtataaagaaggagtcataacaatcccaagaaaaattccaacaaccctgtcactttttgaagcttttctctgttgattttaatctatttattgtagaaatgggaacacttcaagtagtgaaagttacagggtaataaagatggtctttggggaaaaaatttagcaaagttgatagtagagattatgaatattgctgttcattctttccagaccaccaaagcaggaacagattgttaatataactgaaatgtcaaaatgaacttttcgtgtagaatgaccagagaacttgtagttctttccatttggggactgtaattttaccttccattaattgagtatatttgtttcatgttacatctgagcttatagtttagcttgcttcatacaccaattaatagagttccagatggttgcccagaatgtaagagattcttcttctatctttgcgtaaagctgaaagaaaggcatttgcctatgtctctgcattaaggaagcgtacccatttgttgtctttttgctttaaaaagtcacttgaatcagcaaatgtcttaaaatcagagaatactttttcaggatctgagcattgaaatccagttctggggttttcctgagacttatcctttatttgatatttgtttcatggtgatgcatagcagggtttgatgaccagagaatcatggcaagaataataatttccttgttcggaaggtctgtaactggggataaagagtcagaagagtcagttaccattggctggtgaacaactcttcttgatgacacataaaagcagccgttacaaatgtattaagaataattctctttgcccaaattctggtcaaatgaaatttgaaagatgagatataagaaatggccttacgaagatgggctgtaaaatccattttcaaaatgcttttttgtttaaagttgactcacctcagacactaaaagtgtgaggtaataaatagctaagtagcctggcaatatggcaatttcttgtgactcagagctattttttatagtgtttgccaaacttaaattctaagaaactcctgtgtgaaaagaggtgaggattatatttactattttatagaggttgacactgagtctgtaggtagaagggtctatctaattggtacagtcactgggtaatactaaatttccttactcaggaatctagattcacttatcttggaggctctttccacctgtggacaagtggtttcgatatctcaatcagcattagatagtggttatcaagtcatttttgtgggttaattcacttagaagttcaaataatttgctctgagtggtcagatgttctcagtcctaaatactcttgccattgaacatttcagtgtgcctaaagcagatgtcaagatgccctacaggattccaatatagccattctagcaagaaggaattccaaaacacaccttgttccaaacatccctggtagaatgaaagtgacttattttcaaaataatcataataatattaaaaatagtatattatggcccttagaaatgctcatgttattaagttaaaaaaacaagaaaccttgctatatctaaatataattcctgtttttgttatttaaaaaaagcatgcatttgtggacaggaaaaaaaagctatgataatacccatatattaccagacatttctgaaagcagaaattcttggtaatttttctttctttttcttttctatatttcctcagttttctttaaggaacatgtattttatactgagaaaaactaaaaatgaaagcaatagcttttgaaagttttctataagtctctaaagaattattgatcaaatatttcatcaaaatatttcatcaaatttcatcagaaaatcttagaagaaccaaatttaaaagaatcaagactattcaagtgccaagcaggaaagtcaggaagggcataaagagctggcattatttagcttacagaataaattaaattagtttagccaacaaagaatggctgaggaggaattgctatttttctgtaaaaaaaaataacagattattatgtaaagttttataaagagagtaacagtgttttaagtctactactgatgaaggaaagtgaaacaagtatgaagaatgaaatctgacggagatatgctttccaaagaatgagctgtttgaaagagactgacaacatctctggaatcttttgtttcttttttcttgtttttcttttcatttctcttctttggtccttgagaaaaagagagattcgcatgtatttataattctatatgtgtagtagaaccatatgaaggaaactagtttctttttcttttctaatgttacatgaagttttctataaaatatatttgtcagaattttcaagttggcttttcacatttaaaagcagaaatgcttgccaaagtctaactgaagatagatttacttatccctaatgtacaatatgattatttgcaccataaaaggcccaatactctttgagtgcaagttgacttgaagaactatctagattgattctgttaatttattttaatttttactagggtttacatttctattctctctgcattctatggggataaagctcaaagtataaaccttgagtgcttccaaatctaattagtacatcctactccaaacagcctaacaaagagtcaatcaaaggagttctttgacctgctacttgatttgagagttcctaagcagttttcgtgtgtggttctagaatacccagaatgctgattttggtaggaggctgtggatatgtactgcggctacttggcaaaggagtcagtaactcctcccctgaccccggagggttctgtaatgcctcaaatggaatccagttaacacgacacagaggcctctgggcatctattgccatccattcattcagctaagatgactgaaattcctaccatgtgtcagccactgttctagacacttgggatttatccatttaaaaaaggaacctacccttgtagaacttatatttaagtaaaagagataaaaatgaacaaacagtaaagataataaatgatagtatattcggtgataagggctatgtaaacaggaagggtggagaaggcaagggagctcaaaagtatggaagtcaggagacaggttgcattttaaaggttagacagcagtgagtatggaccttttagagaaagtctcatatgagcaaaatgtgaaggaaatgagaaataagcctcgtggatgtctgtgagaagagatttccaggcagaaggaatagcgagtaaaaaagccttaaggatcagccaagagtagggtgtctggagtagagtagatagggggagtaataagagacaaagtcagggaggtaagtaaggtagagtagaggaatagtggccatgctcatgctctaacttagttcccttctaattcaagaacctgttagtcaccttctatgcacctcgtgcctcgcttggtcttcccagcttcccagttcggtctggcatacacttattaagcttccattatatgccagggactgtgttagaaaatgcaagcacaatcctacatgaagcgagatcactatacatcttcagtacttcccattccattttggatcactatgacaaggtttgcagatgtgatatgtactcagaagtgaactttccctacctcctcatgtttacagatctattagacgtatgatccactcagctcacacttacatttggcttcatgtcatcacacaaaaattaattacttgattattgggaaaaaacagtattatagtgtaccaaatgagctgcactttcaaaacaagccagaaacatctttattctcttaaaacccactaagctcctcttcttggctatggataaaatcccagagtttttctgatcacttccagacattagaacaccctcagataataaagagtccagccaggaaacttgtggctctcctcttatttaaacaatctctgctttaacctgcactaggccctatagcatcagtagagaaaaggccggatgcttaggtcgtctgtgattatcttctgcctccctctcccatccttcttctccacttctccatgtcacctgtgattcctccattgtgctgggaaaggatgaagcatatgaggctaaaagatgattgtgtagtgctcttatggcatggttgtgatattgatgcaatcagggcaggtgccaactctttttcttaaaggatacctctgtgggatcttcagagcctcccattctgtctccctggtgataccttctgctctgcccattatgatttcctatgcttcggcatttcacccctgaagtctctttctactgggattacctctccttggcagggctttcaatgtagttatattgcagcagctttccagagtgtccccaaaaaaaactcctgtctctgtcatcataagcaaacacctctactggccctactatcagggaaccctcacaaccaacctctgacatacaggcctttctcagcagtagtcagacaccagcctccttactttaaccctccacagctacccacccaagcacccaggggcatgtccatgttcaggttgctaagactggtatcactacagtcagcaagtgtcccataaaggcagattttttccaagtagcaaataggtagcccagagtaaaaaaaaaaaaaaatgtcagttgcctctttgggcaagtaccccactcttgattgtatttagagtgtcttctgtcacttggcttgaggtagcggaaacagaacattctacaggagagagcagagaaaattacagcactttttctgggctatcaatacataatcttttctccagtgtcttctctgcctctccttagagctatgggtgacagggaaagatcccagacctacagagtaaatttgaatcacatctcaccaagtcctgcctgatccacctttagaaagaaggagatttgccaacattcctttcatagttggggcctcatctaagactgagaaacatcttatgacatcctattacaataatgctgcctttgcctttaatctgttgttcgtaaacataaaaaatcttttcagtctagaaatatctggtagtgtggtaatgacgtttaaaaccaaggatgtaatgatacttcagttggttaaactcaagttttgtaaagacaggtccaagattttttaaatccatgaatagaacccagtcttggggtttaatactgtttcattttcttttgcatatctaaacttatgagtgttattaggtttttcataatgttttgatttttctttaaaagattcatcttgtgaagccattttcagaatacataaatttttttttatttttataacttgtttctcagaagaacaaaaaacactttgcagttttctaaaaatcccactggcgtgatccaattataattagagaaatccagctacagcatcagaaatgagatggaaggaatctgaggcaccatgactgacttgttcatcaccgatgaaccgaatctggcatcgatcagaataggatcaacagaattgtagaattcttaatttggagctattataggaaattaatttacattttggataagatttactaatccaaaaacttaaaaaagaaatatccaattctggcagacttctttttcgaaaggaccaaactcaatgacaaaattttagaattcctgaaaagagttaactggaattaccttggtgttttatttgataggtaatatttactacccacaagcctttgttatgagggtggaatacatctacccaagtcagtcatgtgactggaatcagtgaaagctcgtcactggtgctgcacagtaactcataagcagacagaaagccagaggagagctcttccttctccaaatccctggaaaatgcattgccttaattagcaaacactatcttgagtgactcctctagagactcccaattaactaagcttctagactaacatgaattcttctctcttattagttcatatttatgttttttaaatcaacaaaatttcccaacactttgtcaccctagaacccaacctttatgaacattttttgcgagaaaaatgcaaaagaatgaaactaatgcagtttattaagcaaataatcttaaaagcagcccacaacacaactgctcaccagctcgcaagctcaccggattatatttcctgctgttttcagttacttctatttatacttctaaccggatgaactcaccatgccccctactgcttaagagcaatactaccacagtgtagcacaacacagcacatcctagtattctccagagatttccttctggccatatggtagctttcagaatgcttgttgaacaacattgtttgtctccccttggtcaccaatgccaggataaatctgtggagtcatgctggcagaagaaatggcctccaatcagcaacaacaaacaagttctttattactgaccccaccatctgtccctgtttccacatgccattctcatatagaaacaggtttccgccaggccaggttcagtgtgcatccagcatctaccattaggtcagcttgaatatccagattacaactgtgcttatcctcttacctagctaacatcctttatccagaatggaaagtggttggtggacactgaaaaaagcctgtgaaagccgtactgctgataagagatatgtttgctaacgtcttggattagggatgtgtacttagtggagatatcagcctcggtgtgacaaaagcaagatgtaagtattacttcctttatgttaaggtgtgcacccaccaagaccactctgcttataaacagtgaatatggaaggagtgttccctggtactttaattatcagcccatttttacaattgtgtagccagagatgttcccaagatgaagttgtttcctaaaggctcatttcagagaggtagatcatcctacatgctttgccattgtagtttcaatataaatactttaggcctgcttgcagcgcatcttgagtgctcaaaatatcacatttagtgacaaggataaaaaagacagtgctctcaaaccagcaatattaaagtaagtgtgccaagagcacattatgaaaaaactgatggagatacagagccgacagaatgtctgcagagaagcgcaatgagagaaattgtctttccctgttaataccattatgagaaagctcatggaaagttattttattaagtgtttgtgttattaaaacctattcccctgtctgaaatttaatgctacacaatgtactaaatagtcaggtttcaagagagatgataaacctggaagaattacattactacccaaagtattggtcattgtacagggatttaaaatttaacaaccacattaaacaccaagccaaatcaatagtaatattttcagtctctccgaggcagatgactgaatatgctgaaagcattgtggggttgtgtggcactgtgttagctggtccatgcatcattgaggcccgtgtctggtgtaatcagctctgggaagacactgtattcttagcattcccggaaggcctgctgttccacagcaacaaaagacacaagcacggcacagtaccacagcaccagccgatgaacaataaacctggttcagattgaactatttacttggcatttgctatatccttaggctccactggaaaaattaataggtggtcagctttagcaaatatcacagtgatggaataaggagatttgttagccaacaatttctgatttgtgtcacttgtaaatatgatggttttagttgtccattttaacgattctttctagtcgacaaatacctagctgactactctttaccagtgtcaaggatggcattgaaaaaaacaaaaaagatctagctgattttggctcagaagttctttcttcttgtcataaatttgcgttcttgccttctttaaaggtgtcatttaatggcagcaccttatttttactgacagtgtttttggggaagttcagactattcgttcgtgattcatccaaatacgtgattctcccttggattccagcacaatttgtgaccttctaatactgaagcactaaatatcattcctgctttgatggcaggaagtttccagggaaaaacctaggtgggtaggaattgagaattccatgagagagatactaagataccccagtctggcatgggaaaaaaaatctcattacgtgtccaaaaggaaaaacacacacatgtgtatacatgactggattcgcgaggcagtccacacagtgtaggagagtgccactgaatcccagtgctaaacatgagacatgcctctcattttctcgtctttaaaacaggaataataacagtactgacctcatagggtgattgcgaagactatatggaaaaaagaaacatgtttagcacaaagcatagcacaatgagtgctcaggattttatttgtgtaatgattcctagcatttttaaagcttagagttttatgaatggagactctgatttaggatcatgctggatttccaacctttaaaattatgcaagtcattcttgtgtggaagcagaaagtgaataaatggattggcatcaaacaacatcagactggcaacagggaggcctaaatttcagtcttaacgttatattgactcagctcgctacttctgggaatgatagtaactcctcgggccttggtttcctcatttgaactgagggaactggactctatcaaagtcctttctgatttaaagaacggtgatcctggctgtgttcttccttgcatgcagaaaatggccatagtccattgtagaggaattttgaaaaataacagaaacactctctcagcctagtatttccactattagtccatcattttttaacaaggtccatcattaaaaatcctgtctagacatctgcttttaaaagacagctatcaatcaatcaatttagctattgagtacccatgtggggtgagtatagaggatagaaaacaagaaatcctgttctaccataaaaccttgaaatctacttggaaagaaaaaagacactattttttaaaaattaatatttagtaagggtcaaatgaggaacacaggcaacaactattccactcatgttcctacatgtcttttaaagtagtttaccaatttaaaacattaaaggtaataaaatttttaaaatttaagacacagcagaaattatttagaaagcaagaagtgcttgtatgggaaacaaaagataagctatattattaaaacaggacatcatgttttgctgtaaacttattggtagccaagaaactaaagaaattcatgagttttatagctctcatggtctgataaaaggggatgtctaggtttgtcttaagagacaacactttgctcctggcagtaaatattgggaaaattttgttacatggatccatatttaatgaacacttaataatttactgtacaatgcctatagccggggttttgtgaaaaatacaaaagtgtctttcaaatacctataccatatcaatttttagtgaaagctaaggattagctaaatcaactcaaaagaagtatgctcgagtgaacctaagctaataaaatctaagaacgttgcttcttggtgaccaaacttaatgcttagggaaactcagaaaaatggtggattaagctgtcttttaggctgattttttaaaatatcaattatctccaaaacactttttaaataaaaaaaatatatatatataagaccccacctggaaagagtaacccactaggtactgttcacctttgcgtaaattattttatcagatctttttctatttaaactcccaacactgaggtactttcaaatccataccttggtttcactgagaggaggttaagtgtcaaaggcaacgttaacttacttcatcattatgccgagggctactaataagaagcaacatctcacgtggccctgcagagctgcgctgaacctttaaaagtatgtagtaaaaattctctgctaactgggccaccaccaacttcagaaagtcgtgtcaaaatagaacattcaaatagtgaaaatctactgatattttaagatttaaccaaatggtcaccctctttaaggaagcctttgttgacacgtttcctcctcttcctccccaaacttggtaaaatggcataaatgttaattcaattcatttaattcttatcacaactgcaagaaatcatgactattattaccatcctgtcacgtatgaggaaagtagcatacaaaggtggtatataatttgccaaactatccagcctgtcggtagcagaccagagagctagactcaggcaatctgtttcagaactcatgctcatacatacgatgtgagaataccaaattctggcttattttaatctgatcatttttcagaggaaagcaaatatttatactcaggtttaatagggttattttcgctatggaaatacattaataactcaatttaaatgttgaaagtgatgttcttcccattttttgaaaacttatggtcagcctagagccagctatataaaaccctagcttggccataagtctttacctaaaagataaagacattattatcagcttattattgctgctcacacttacaccttaacagtctctacctaatataattagaatatatatatatatatatatatatatatatatatatatatatatatatatatatttttttttttttttttgaaacagagtctggctctgtgacccaggctggagtacagtggcgtgatctcagctcactgcaacctccacctcccgggtttcagcgattcccccacctcagcctcctgagtagctgggactacaggcgcatgccgtaacacctggctaattttttgtatttttagtagagacgggatttcaccatgttggccaggctggtctcgaactcctgacttcaagtgatctgcccacctcagcttcccaaagtgctgagattacaggtgtgaaccaccgcaccaggcctacaatataattttaaataaaaaatgtaacctaataggtcaatgtgtatcatagaagttttcatacaacaatgggaaaggattttttaaattgcagtgtgctctgtgatatggtatagcaattacagaagaaaaagatcaaaagtgtctcataccatataccaaaacaaatttcaaaggattagatagttagatataaaaacaaaccaaagtacatgtagaagaaaataaaactgaatatttaccaagcttctataggtaatcaatttttaaaagcaacaaaaaggaaaaagacactaacaagcagattcccctgcataagttagagaaaaaagttattttttcaaataaaaaaagtagaataaaataaagctatgataccattgtatgttatcactatcagaaagcaattaaaaaaggagaagaccaaaaatatatttatctgctttaataaattgtaaaatttatgtatgtaatatataacccaaatccaaaaaggctagcaacagatttcgggaaaaatataataagtgtggcagaattaatgcttttattttataaaaggctaagctaaatttttttaaaaaatatcttagtactctatagtcagtttacaaaacaagaaatacatctaaaaaagaacctagaaaatgttcaagctaactagttttttaaaaaattgaaaggaaaactaaggccttactttttcatcacataccaacggagcaaaaaaaataatattcatgttatattaagaaatatcaagtattggtttgaaactgttgatgtcataaatattgatgactttagaaataggttcagctctttggaaaagaaattctttaaagtatttgaattaactctaagtaaataatccaaaatatattttaatgtgcatatagaagttctcttcatcattgcttactaatgaaatagtagtcattataaaaacttgggagcaatatagaaaataattgattaaattacagtaaatttattggatcaggtgttttaatgataaaatgcaaaatgatcaaacatatgcaagtcatttttcatcttgatgatttgcacatgaaaaagatggaagaaggacctataagaatgatagaatttatgatagaatttttagagtgctaaatttatgtagtagttgttgtttacatttctccatttgtcaaatgttctatagttattattgttatatttgaaaaatataaagacaaaatgtttatgcacaattcctattttatattagaaatatggagctgtgaagatttcctccatctgattcatttcctaacccaatacactgtaccgtagctatgttaatgaatgtggggtagaatagattagtgataagatacaacattgtatttatctgtagaggcatttgtatatcacttgaggaaaaaattcttagtatataaaattttattattagtaacagttcttacactgaagtattaacgccaggaacgatgttcctgttggtgaaagctttagcgatgatttgactgactgacctaaagaatgctgagatgtaggaaagtctgatgaggatcataaaggaattacattgtgtatgtgtgtttttaaaaatatgtttgtggtttgtttttgctttttcaaaatcaacattttcctaggcttctttctgcatattcttcaaatttttagttgtgtttacttttaatagctcagtaattgggactgccacagaaaccttttcagacatattttaaattgtaggcaccctggcaaccatttgtcttcatttcaaaatcatttaagtaaaggaaaataagtgacaaaaaagtttttgttatgtgaaaaatacaaaaaaaggtaaccctagaaactaaaattattccattttgaatgatctttttttcttcattgctggttttgttcatggattttcttcctgttaggacctggatgccttggcgtattgcactcttcattcttcggagtctctactttgaactcctcagtaggagcaccttgatttcacctctgtattgagtcatatgtgatcaggtcatgaagactgacgtttgtgctcaggtttcttcagatcctataaacattcacacacacacacaaatagttatctcttcagcttccactgctcttgaccttctcagtgtatttcagttgtcttgctctgacatatagcagggaccagcaatgcatgctctttgatcttcttcttgtgcacatcccatagcactaacctttctcaggtggaggtaagagagatattaatggcctttttgtgactgctatctagcaaagttagctgatatagtggtgcctgggtattattacatgcatgaaaagtaccattctctttcagatattctgtatgaggattatagcagggaaaaataccacacattacctcactttttacctcaagttagggaatataactcactaagaatagatgaaagccaataaggatgagtaccatattgttgtgctcaactttgaccaaaagccaatttaggttatttcaaatgactagttacctctgacctgtagcgttccttttttttttctttttgatatattttagtgctttgaaattttgggaatccaatcaggaaattcttgagcatcttctatgtgtaaagtgctgcctttacaggaaatagaacttactagcatattcatttattcccaaacactgttcatacttaaaacttgtcataatgattttcagtaattaagtaataactgggcatgcagaagttagatagatagatagatagatagagagagagaaagagggagggagggagtgagggagggagggaggaaagaaggaaggaaggaaggaaggaaggaaggaaggaaggaaggaaggaaggagaaagaagaaagaaaggaagaaagaaagaaagagggagagagggaaggagggaaggaaaggaaggaaggaaggaaggaaggaagggagaaagaagaaagaaaggaagaaagaaagaaagagagagggagagagggaaggagggaaggaaaggaaggaaggaaggaaaaaagaaaaggatagaggagaggaaaggaaaggaaaagatcagatggtaggaattagagtgaaaaagataaaatggagatggaatagagttagtatctatgtgtatgtaagtcataagctaaatattatcagtagtagggatgatatccctaataaagggagtttaaaaataatactctgagcagcctagtaactaatgcaaaaagtggagcaatcacatatagatcacatgcagaccacaggacctacaggtataaaccaatagaagaggtaaagagcatctccttctggtaggattccctcaagaaatgtctgatgtgtccatacaaagaagatactttgttctagaaccacatctctgatacaaatgcaacaacaggttccataatgtagcattttatactttcttttctcactcgtaaccatggaaagaattttgcaaaggactctccagctaaccagatctctaaagatctagcttaaatttagaacacctagaaataaaatttagagaattcagaaaagtggatccttcaaagtattctccttaaatattttattttcacatctatgtttgctcaagactcggtggtggacaacatgagagtagcagtgaaattttcctgtattgctatttaaaggcagtgagtgcctttttattttaccttctaatagaatatcaacaggaaaggctggacatttagaaatgtcagggtatggaccaggagaatcctcgtgagcaaaaccaacattctgtgtaaagataatcctgagtctatttaaaacacactgtgaaatgggtaacggagatgttgaagatgacatgaagatgcagtttacagtcactgggtgcaaacaggagttaaaactgcaaagtataataaaaagcagaataaaaatgctacaataggatgcaatgacagtagactttctaaaagaaataaccatcttgtggtggcatgttagagggtaatttgagtgaggaagcctagcattaaaagagactgactaagaaactattggaataggccatgtgagatcagttcaagggcctgaaacctgcggaagagccacggaaatgaaggggaagagtgagtgagagagatgggagaggaaaatgactgtgcttggtgaccaactaggggcaacagcaaagaagtcagaggtcacacgaagctttctagtctctgcagctgtgttactatatatcaatgatcgtgacaaggaagaccaagatggaatatatgaggcaactgaaaatttgaatctagcactcagcaaatgaccattttaagaatacagcaggaccgggtgtggtggctcacacctgtaatcccagcactttgggaggccaaggcaggaggatcacctgaggttaggagttcgagaccagcctggccaacatggtgaaaccctgtctatactaaaaaatacaaaaaattagctgggtgtggtggcacgtgcctgtagtcccagctacttgcaaggctgaggcaggagaatctcttgaactgggaggtggaggttgcagtgatccaaaatcatgccattgcactccatcctgggtgacagagcaagactccataaaaaaaaaaaaaaaagaatacagcaggaccttttagaatgagtatttgcatgtttccaagaataactacagataagctctgtaaggaacaatgttgcaagctccggcttggacaaagtttgggtgggcttcagtgggagaggacagaaaaatggtattttttgtcactcctccatccacactctacttttctctccttccctccatctcagttgatactatcctacaacatacagtattcaaatattgtttcaggaaatatttactttaatctttaggagagaaaaaagcaaaaaacaaaaataccctaatagcatcaaagttagcatagcacaattccagacttctgctcattgttgaaatagaagggcttctgttcagtctgcaagagtcttgatatactgcagtgttcctgctacacaggcaggcagcaatccctccccgagtcccgtaagagcattttacattttcttcccatctttcagctcataaacatgtttctcttcagaacacacaccatatgccattggaaaagggctgtaaagttttatagatatatttgaaagtattataagggtatactaaagcaaaactaatgcaaaggaattggaattattgaacaatggaattaaaatattaggcacggataactctaaccacactcagcttgtttgtttgtataagtcataaaaacccggaactcttgtttagttcaaagacatgaagcctttgagtcaggcttaaaaaaaaatcagcaatggctatactttattgaaagcatatatgccaggcatcagtaaatgagaactcaagaatatgtatgtttctgtaatagcctaaataatatatatgatgctctacatattttggggtgagaaaacttattgcattgcatcttgtttgcaattccttgggatttttctgcaggcatcctttttctgaagggattaatgcattcatttaatcagaattatttagtgcctgtttcagtgagagtgttcaaggatacagaatagaaatactaatacttgatactgaggaacctgcactccagcatgaaccaacacttattcattcacacatttattaagcactcaacaaatttattgagtgccgactgctatgtacttggtctgtgcaagattagcaatacatacatggtttgttattgcagtacatggaaccgtgtgtggaagataatggcctctgtttaatatactcttcccataatccaagaagatgctcagtggagtttagccatgagttggtgtttcaaaaaagaaacaatacaggagctgtaagacaaggaaatggctccagaaatggaaatgttgatgtcaaaggtctcaaaataactaaaaaaatatataatctgtagcaagtaaattagtactggaaagatgccagtaggggactactgcagaaactaattgttgggattttgagcctgatgtaagtaatagagcttaatgaggatgggggaaaatgagttgatgaatacctttctagcaaccttcaagttggaatttctagaattatttagaatgtcataaaataataggaaaaggaggtggaatgggatacgaggggtttctgtagcttcatagaaaaaggagttaggtacagaaatgctgcgtaggaagatgaagcaagagtcagccaatgagagatgtacaactctgcacagaagcttttactagtctcctttgcctacaaaaatgtaacttccaagaccctcccctacctggaccaacccaggctcccttttcaacataccatcagcattgctacccttcttcataaacactgaggtccagtcaggctttgatctgtagtttccatgttctgttttcctctttgtcacaaacatcatctcacggcttggaatgtcttttctctttatgctgtaatgtccagactttgcatatgctgtcaggccttgttcgtgtccaagaaggcctgccttatcctccaattgaatgtgtcacttcccttgtatgaagcttgccatttgctacgtttatacttgtcttcccttttcaattagactgtaagccctttgtgagcaacatccaagtactatttatctttgggttccttagaaaaccttgtaaagtactttgtacataaacacaactcaaaaatatttgttgaatgaataaaggactgcccaggcagagcaaggtacaaaagtcctaaagaaaatataaaatttgagaaaatttcaagatgctgttcccagggaattttaagaaaaactgaaatgtggaaatcatgtgcaaaagacacgctaaagagaaaatgaagttttagctaccattcacctgttcatttactcaacgaatgtatttgaacagttgtctgtgacagacagcatgctattaatattacaagattctgtcctaggcctgagggaaagtcaggtactcagtatagtgtagtaaatactaagaatgagttaatctcagatgtgatagaagtgagtgtcatcagggagtgcttcctggagaaggccatatcaaggtgggacctaggacatagtaaggattcacctattagattatgttggaggaagggtatatgagacccagcatgcacgtgcatagactgaggggcatgatatgtaatggaacattaggggcctgcaaggaatttgatttggtacaagcttgagtgtgaacaagtggagaaaggggccagggaggcaaatccaagcaagtgcttgctttgttaagatccagagctttcaataaaacatgtatataaaaatgccttataatctataggtaattaaaaaacaagtaggatgggaacaagtgtcagatacatctagaagttctacttgagcaaatttatcaaatactcatgtgtggaggttggattcaccactgaataccacatccataagaatgagggccaaaagagcagttctggaaagagcctcacacgcacagcaaatctcacttgtttttaaaaattgggaatttctgacaagtcagacaagagcatggctgaagtttatcattgtactattaatctcaaaagttttacttttgaaattactttttgtacttagccagtaatgatctcaaaagaaaggaatgatataaattatttctaaactaaaccgaattaaccattttaaactatcttaaaagtacctattcatataaaaataattttttgcttagtagtttagactgctatgtcaaaatattataaatcaggcttataaaccacagaaatttattccaaaatataggtgctagcaggtttggtgtctggtgagggcctattatctggttcctaaacagccatcttttcactataacttcacatggtagaaagaggaaggggtctttctaagatcttttttatgaaggcattaatttcagtttttaggacttcaccctcatgacctaatcacttcccaaagtccctacctcctactaccatcactttggaggttggggtttcaatatatgaattgggggaggacacagtcagaccatagcaattgcttctctggcttattctggcctgttgagtaaactgagtctcattctccaggcctttgcaagtattcagcatagttacaataattataagtactagaaagtcataaaactggaatttcttttttatacctttttactcaaatctacttaattttctataacaaatgagatgttggatatgagtgagaaaaaatgcatcagaacatctatggtgtaatactttttctgtttttttgttgagaaaaacgatctcatgtgatcaagatagtcttttgaaaacaagattcatccacataaataggagacatgttatacatgttgagtctccattcacaagcaaacagtcttatcttagtcaaaaatgggggattattttaaaatatttcttcttttctgaaaatccagttgccactgcaaggtcctgaaaccactgataacttcccaaaagaagtggcttatttcttccccacttgttagtttatctaaaaagaatcctttaagccttttaaaaaggtttcaaaattaaattaacattctaaaaaaagagttttgaagttgcagttttactgtattaattcagtccctccagatgctattcagggtgaacctagagtttttctttcatacccactaggaaaagtacgtactctctaacttcccatgttagagcccacaggtttttagagaatatttatgaacctcttggttagcagataaaaagaagtaagtgactttcttaaattcataaagcaaaggtaatccagaaaatcactatgaggagatcagataaactattcactgtgtggatgcacaaatatttggggtgggatagatcatccggggtgtgcaaagatgcaggaaaattttagtagcatctaactttcctcagtggacttatatccactgaacccaaacattttgtgcctagtagctggccaaataggaaggttaaattccaagtggacaatggagtctatattctttcatcctttgtagacactaaagcatgttaaaagaaataatggaaaatacaaagcacagattattatgtggacactgacctactgaacctgtgcttggaataaatctagtccttttgtttccttgaactgtttttttgggtaactgtagctctccatgtttttaaaattactcagaaaagttactaaagtcataatgttgaagcattgcagctcagttagcatgtctttctgccttatctcacaacaaagtattaagaaataaataacctaagagttaggagaattattttattagggactaaaatctgtctggtcaaactaatgacacattaaaataccagaaatctgtgctatttagagcagggcgggggtggagggcatttgctttggtaaaatcaggaagaagtccattaggaaattttcctctggttcctacagatcaggccttgcatcatttcaaaccataaattcaccagttaatcagtgactttcacgcaaaaattgagagtgcaaaatactccttccaaagttgtttaatgaagcaaaatccatggaaaagtgaaatgcaaaaaaccatcatgatttaaaatgcagagagatagaacttcacaatggcagaccatatttggcagggacccagattcattattgcacattgacctgaatcacccaggctactctgtatgctgcagggctcagaacctgcacagtcctctgataactcaataaaggtgtctgccgaaacacagcagcaactatagaggaaattggatatttcagatgttgtaatgaagctaacaacaacaacaaaaaatctgttaaagattagatagactataaaataaatttgggaaagataaatgagagaattaaaaccaaaagtaaatgttgatatgcattcatatatatgtgtccatgtatattttcttacttaataaatgttctcatccattttttaagcatctagattgtggattttcttacattcaaaggaccaataaagaaaaattttgtaaataagctagtgtataaatgtgatgccaaggagcatatatatttttcttcatatatttactttgtttatcagattcaaaagtaagtgagtcctctgggctattgaaggtactatatttcaaaccctactcagatgaatttttactgtttttcttatatttatttgatagcataataccaatttcagaggacaataaagaacaaagtctcaatgaactagttaaatttaaccttaatgttagaagcagagtttattagaaaaaaataaattttgtctacaggaagtgtggtaaactgtttgtgtgtatatcttagtactgaccgacatatagagtaaatatgtttcttctatgtaaagatacccaatttttggaattcaaatgagaacctacaatgttatggttagcattaggattttcagcctatgtttcatcagctgaaaactgaggtttttcctttaaaactgaaataaatgtgtcagcatcatgttttactattccctggccacatggtagttaacctttactttaaagataatagaggatggtctgatctaacgagatccaagtatagaagaaaaatatctgagagtataggcaaccttatatttaatttgactaatcagagcagtgcaattgagaactaaaaagtcaattgcataaaagagtcaagaaatgatcatccactagtctctccagtagtcacattcttctcaggtccacatacagttttattgtcaatattcaggaaaaaaaaataaagatagcaaggagtaaagagaagagtttctttttttaactgaagggatagagtaagtgatataaggaaagattaaagcaacatttttttaaagaacagtagacttgcttagtatcatcaggcatgtaacaggctgacttttcgcaatgccatgtggtaattatctgcgtacatatatgaggaaataagatgaaattggttataattaagttaaagagatttcatttgaagaattcttaaccattcagattaagaatactagaaagaataaggagcaaaattgcaaagtctctgatgggaagtctttgaaatgtaagtgtatgactctttattctagaatattctacatttactgctttacagttataagttggatagattccatagttcttaagctttatagcctagtacttctaaatacttatttacttgactaagcatatttatccctagccccatcactgccacaaaaccaaaatagagcatccttcctacagcacaggcttctgaatgaagtctgtctcctctttaagagctattcctggttacccaataaaataatacaacatgtaaaacccagcctctatatgatagtcacctatctttctagaattatctctcttttcatccgtactccagcaaacatctacaaaggaagtaggctacatgaggctaattgctactcctcaaatgcattctgcttcccttaacagcattctcattgccttgaatgccatttatctcatctctggtactgaaaacatttccatccttcaagattcaagaatcttggacaaaccctccttgatttcccatgataatacattccatgccctgctctagactgaaacatgtatgtaaacttccctagatcataatctacttgcagacccaggccaggatgttgtctgtcttacagtgccaagcatggtacctatgctataatggccctcattgaattactttgcttacagcatgctggactaatagctgaagccttttttcgagcccaaaccaactaggtttattttttatttcagccacacataagtcccaggatctgactctgtttataagcccacctttgggctaattccttaccctggatttggagtttggctccttctcccgtaccaagttcagctcttgtagagttcaaaagcaccctgaaagcaagaggtggttttctttccaacagagttgttacatgcatcaacctatataatgcagccattcctgcacccaagaaacaactggccagaagtgacctcatgataattctttgggaaacatgtttttgagcacctgcagtatgttaaaaacagtcccataccctgaggattatttagtaaacagcagtatacttacatatcattggaatggggatagataataaaataagtaaattataaagtgatattgaaagtcagaagtgccaagaggggaaaaagtcatggaagggatatagtgaaggccaatgagtggcaggaggcagggaagaattttaatgtcaatgggatgattaggaaagttcccactgagaatgtgatatttgaataaaggcttgaagaaacaatttcttgacacaagattcctactggaaaggtagcaggtcctcacctgctcaggggctccacccctctgcatctccaccatggcactagtgcagtgtggtgtggagttgacctcattctcctgtggcagcatcattcccagagtaaattaagtttctatccctggcttattctagagttgtgaaatacagagagaaaagagtaaaaccagagttattttatgatcccctgacagaaaacacagtgttatttattacttagaactctccccagagattaatcaagatttaatatccctagttgactaatatgctcaggcatcaccattaatacatacttagacacttggcattccattttagtagtttcacaaacatctttagcaaagctaactaacactgtggtcccagattattttctcgctaaagaccctccatatttcttcaacttgctgagctcacaccatttgcaaaagaagctttgtacttacaggaaaacatggagggcttagtatgtgccccatggtttttacagccatactactaaaaacgtggttgggggtgcagaggagagactcagagcattttcacattttcctattgacacaaattggctgttttgacaaggtaaagtcgtggcataggattttttagataaattaacagaatgaaagtgctaaattaaaattgcaacattgatttcctttttagctcagctgtgcattatataaaagggtcaggagaaggatttattactggcgatgaggctctgtcgtccgctaagagactggtatataaaataaagttgtccatttcagacaccctttgtcttcaaggaaagctgtctaggtggcccatgggtggcaaaggcgctgaaaggaaatggaaattgataatcggtcctgttaggctgattctctgcatgttcaattcatatccttttgaaaagaagagattaagatgaaacctcattgaggaatacacattttgaagaaaatagaaacaaaggttctgcaaggctatttcagttggtgtcaaatgtgagaacaaggcgacacaaacttatatgaagaaagggcattaacaaaatccccagacaaagaaggagctaatagcaaatatatgcagccgtctttgtggatgctcacaggagaagtggtacaacttgatttacaaagggcctggataattatttgttacttggagccaaccctgcctctccctctgcagagggcaggcactgaccatctgcgggtcttcgtttagcttttgtgtggatgagaattagccacatttctgcatctggtaagctttgcatgaagagatgtttgaagcactggctttgttttgttttaaatctttaaactgctccctcagcttcagtcagaggattactgcacatctaaccacgaataaattgaaatatcagctgaagagagcgcatgttgcttgctggtggaataatggatggcaggtggtagagggttttgttttcagaaaagcacaggaggctagaagtgacaagagtgattttgtgagagggctgaaactgtcaggatgaagtcagaggggtcagtagttcctgagctgacctttttaaacaaatcctgagaagaccttttactggatcctcacagcagttgcacattcatgccagaaaggttgcccctccttctagatattgagaatcctaacaaaaagcatattttctatgatagggcccatgttcacccacgtggtagcctgacactccctctcctgtcagcccatgacacacaatcctaactgctcacctgctccaccacacacacacaccagcatttgagctgtcccttaacacttttctgcagtctttgatatcatcttcctgtcaaatcacagaaatcaagggactgggctgcaaagcgggacactcgtgtgctaatttccatgtcattgctttgaatggttttctagcatggagagctgttacctgacttctggagacatactaaagtgctgagacccattgtagatggcctaaaaattcacttctcaatgttcataagccagaattatagaatgcactgccatatggcttttttttcaaataaatattgttctgtttgagctctgttatgtcactggaagtcacaataaatcacacacttagtatgctttctaatgaatgcttgttgttcaaaattcccaatacctgaaggaaagaaccttctgtccccaaagtctgtgaaaaaaaatgagggattttctcccgttgtcactaaatattattatattattgtatcctcttccattattttttttctttcctgtttgcaactggcacagtaatttactcattcaacatcaatcctcagatgatatgcgctaaaccaccaaaatgtgagttattaaagacaaacaaacaagttttttgaaagttttgaagcaaataaatgtgattataaaacttagaatatttttcttccatttggttctatgtagttatctaaacttctgagtcgacagtaaaagggaaatttggtgactgattccttagataagagttaatttttgaatctggcagaaaaaatatttaaaacaaagccctagaacctgaatctccttattgagtattgattccacgttcagtactcttcaatgggcactgctgtttccaggcacttaaacagcaatgcagcttatattgttgaaccatgtttttttgatgccctcctcagttcctgccccatgcagaagccaggaagcatggaatctactttatagttatctcttgctttctacctgtgtgtttttaaatggctttgtatgttggaaaagtttctggcttagaaaaaaaaatgttaaaaagaaagagaaatggaaagagagtttaagcagaaggttaacgacagggtgggaaacaaaagggggaaaaagaaggtgttatcacaataaaatctgaagattatcaagagagctcagggtgcccagagtctgggtggaagacccgcctggactgggagacgatgtgctggcctctaagggatgtcacttcccccttgcatcagcaaggtcagtcttaggaagaaccgaaagaaaaggaaaaataaaacaaaaggtgacatttgaaaagaaaagatcaatagatatatacaattacaatgaaatctcaagcaaaaaggaagcaaaaatgtattctataagaatgaaaacagaatcctttaattctctactgttacctcaaacgcaggagagaattaaatagtgaaaaggtgttatatataattatttggtcagaaaatctagagagaggagtaatttcttgtcaaataaaaactactaaaattgattatgtagtcaataatcatccatagaattggaagcaaattttaaaatttattattaaaaagatatcaggcacaagtgatttcacatctgactagctaattgttttatcagagtttctatgttatttcaacaattacaacttatagaaaggtacagaaaactccctaataaatttatgaaccttgaccaactttaatactaaatcctgacaatagtacaacccagaaaattgtagaccaaaattatagaccattttcacttatgaataaagatgcaaaagttctaaagaaagtatgataaattgcatcttcgacattctagcgacactaaaagtttcttgcaatatgtatacaatggattgtctttctcctaattgtctctgtattaactttatagaatgaatgtgggtaaaccttaggaaataggttgaattagtacataagaaacatgataagagtgcttgacccagcttcctgtaaatgtcctctgcagttatatagcaataaaaaagctttgctttagcatatggttctgaaacgatcttctagtgaagattgttcaggaagtctttcttcatccatacgttcacatatagttgaaagcagcagataaatgagcgacacttgataattacaaggcattcagtcaatcaatcaataaagattttattttggaaactttgtagtgttagcacattcaacctgtcatatgcttttattccaggggtctggagttgcattttttttttatggagtcctgctctgttgtccaggctggaatgcagtggtgtgatctctgctcactgcaacctctgcctccagggttcaagcgattctcttacctcagcctcctgagtagctgggattacagatacacaccactatgcctggctaattttttttttttttttttttgtatttttagtagacatggggtttcgccatgttggctaggctggtctcgaactcctgacctcaggtgatccacccacctcggcctcccgaagtgctagaattacaggtgtgagtcactggcctggagttgcctttttgagcattttctgaggtagatatctaaagacaactcaaatttatctgtatataaaacactgcagaaaggagattgtgtacaaaaattaatcctgtgagaaaaactacccatttccatagtaaatccatgatttgtcattttatttgtatatttatatatttgtatcttttatttatttatttattttgagacagggtcttcctctgctgcccaggctggggtgcagtgacacaatcctggctccctgcagccttgacctcctgggctcaagcaatccttccacctcagccttccgagtagctggaactacaggtgcatgccaccacacccagctaagttttgtattttttgtagagacaggtttcaccatgttgcccaggctggttttcaactcctgggctcaagtaatctgccttccttggccccccgaagttctgggactataggtgtgtgccactgtgcatgaccaatttgtcattttacatcagctatagtttatatctggacctcctaagcttgtgtcttggtaagatgcactatagcccccccgttaaaaggcagtcgtggtgcaggcagtttgggtgtgctcattgaatagggagccagctagagggatcaatacctaaaaaattgtaggtgctcagcaaacattggtttaagttaaatgtttaacttatttgggaagacaaacttttaatctgtgtttttgtatataaatattctcatatgtatatcctcctaaatgtatttcttctttgagagctgcaaatagaaaagaactcactctaataaaagctaacattatagttttaattcttggaaagttagcatcacagtttaattcttggaggatattaatttgccaacaccccatatagacctaaaatgtaggagtttcatattctcaggaataaaaaaaatctatatcctcaaacatatgcagtgctttgctgaactgaatgagcatttcttacttattatgtatttaaccatattttagaagtgggcctcaggtctacttatcatatttccatctgtgtagtcattacatatgcatcctcccacagcatacatttctttgatatctaccattctaaattacgatttgagattcatattttaaaaacatataaggtaacaattgtgaccataataatgattgtaattttcttcctgcataggtttttataaccatttctgttagtgtgacttttaagacaatacttttaagaacattttcctcattataaaagtagtgtgtgctcactgtagaaaattaggaaaatacataagtataataaaaactatattaggatcatactgtatgtgctgctgtaatcctgctttctctttcacttaaaaatatattatggaagcattttacatgcaccttttaattcttctaaacgtgcttctctttgaaatggccacgtaggattttcaggagtaaataccaattttgtcaatttgctattttagaactttcaaacaataaaatcagaatccatgttgatgacaaactgaagaactcatgggggccaatgctggtagtcaaggacttttctctcaaacacaaaatgttgcaataccataagaaacaagtcaaagcaagggaagaccccaaattcagcacccaccctttattctgtgtgttgacacaaaacattgatgaaagcaagtgaagagtgagcctcctcatattgtcctctgtgtaatagaacccacaccattgtataagcagtaatgacttctttggccgtaacttaaagacatcctatttacactatggtccttttttcagttgtgaatagagtgcatttaaattacaaacttggaaggaagaggtaaaaggattaccaagtgtgagagatgaatgacaaaaagcagtaaatcctatgcgatcagaaggataagtctcacagttcatctgacataagagatggattacaatggctctgaagtggaagacagtttacttagaaatttagcagtaatttgcatttaaggaatgcattagtgtattcacatatacagtttcatcattggatggttaacaggaatatatggtatttgtttgtgattttattgaatatgatgggttttttttcatcattcagggaaaatctgctttcctcagactattggctgccataaccaccatcagccattaaatgacgtagtgatgctgtattgacactgtcctgtgtatctttctctttgtggctcattctgccctagaaaaatatctctaaggggcagtgccagaattaacccctgcacactgatcaacagaaacttcttctagaaataactaagtctgtcaacctttcaaatatttaactcatgcaaagacattcatggagaaatacaagagggaaatcattctcttataaaatggttaggacatcctgagtttctttgaaggaacaaatattgcttatgctattttctccttgaattcacattagaagacacaaatacaaatatataatgtacatagtctttaacctaaaaaattctttagcaccacatacctctagaagagtagaagagatatggataggaaaatggagtcaagaaacaataaagacacctgtctcagaagttttcaggtatggacttaacccgactcaagaacatacggtaatgtccaccctcacctctctttctttgtgatagtcactcatcgttttctgggataatgctggaagtagaacaaggtttattctttgcttttctatgatggcaaattttgaagttttataatccaaaatgtggactttcattcataaatagggttttaggaatgatgatgtaatttccatgtagcatcgccctaggagtaatgagatgccattactgtattatggctactaacaatgatgagaaggagacttagaactgagccagtaagtatttagaaaacacaatgcattttaccaaatctaagacatgcattttttcatttttaatacctctgaatcagtttgtcttacaattgattatatcgtcaagttaccagatgctgaatgtgaaaaagttttagtaatattttaaacaacatattttccttatattttcttgtttattgtattaataaacaatgtatgatagcatcttaaatgtgatgaaatatagagctgtgcttttaatttgtaataaatgaaggtaaaattattcactgttttggtagtacttataactgatattcaaatatatcaacatataccatctccaaaactcccctagacaaagaaaacacattgtcttggaaagacgttccacaaaatgaaattgaaaatctcatcctgattctgtttagaaacttactttctcaaatctaactaatggggtattgggccaggtagattagtgaattccacacataatccccccaaactcaatttattcattaaattcacttcttcttcctctacgaaatggattcctaaggctagaggactaaccagctagatcaatttattaccttttcttacctttcctttctgatagtcaataatgaaagaaatgcacaagtcagaaagaagcagtaacacaagggcccagattatccctaaatggaaaaaccatccctagataacagagagcccgctgtagctttaaatctttctataggattcagttcaaaatattggggtagaatatagataccatatatgtattatggatatgcattgtatgtatatgtgtgtatatgcacagtaggcacacacatatttaattacacagtcacatgtgttaaaaaggctttgaccacaatgttctgaaaaccactcttaagaagcaagaatgtgcatgttaaagttactttctgggttaacagagatgaggagaaaagttattggggtttgcgaatttattttaaatacattccttaaaaatacccactgacctacatttattgaaagaaaaacagtcaactacaaatgtaattgttatcctgtcaagaatttattaatagacaggctgatgtcatctttgtttaaatgctctaagttgaccgaatttcatttacattaatggatggaaagtccttttcttacttgtccaacaaactggagacaaagtgcctgccaatgttttaatttctttttcatgttctagttagagagtgagaagaatgctttcactccacagtgtcatgaatatgataatctatggaaatcacgggaaagcaggtacttaacttaagcatatactgtactacaggaatccctgatgaattcaagtctcttctgtttagagaagatgttgttgcctgtgaagtgacacactgccagatgttcgtgaagtagcatggtagcaggctcagatcttagcatcttccctaacccccacagatgacagcatctagtttaggctacagaatggtcttgctttcattctttaagcactagtgtttacatttacttgtcaactatcaaatcttcattttcttaattttacttatttaaacatgtggagcacaaaattacataactgtatgagcaatcctgactttatacagtgtatgcagtctaaatgtgaaataagcagttctccatcacgtacaacatgcttaatccattgacttcccttataaatgctggagaaatggtttgctgaagggatgggaaatgtttactatatcgtaatattaagcacaaggcaaaatattttaaaagcacatttttaaaaaataaatacattaatatagtgtcactgtgtacataagtaattcacaaagttaataaaaagctatgagacattgctagaatttctataataaaaataatgttgatgataagaatttctataatgatggcaaagaggcctattaagtgcctattgtgtatgaagctctggcttcactctatacaatttatataaattatataatctttacaaccttataaaatattattcccattttatgagtgaggaaactgagatcttacaaaagttaagtaaaacacgactaagtcaaaaacctagtaaaaatggagccagaattggaagccaagctaagttcaagactgtactgtgtataaatgtacaattacccagtaccttcattcattcaagagtgtgcaatgagccaggcattgctcaaggttctggaaattagtaaataagattagtgaacattttaatctagtaccttttagaggggttggagatttttaaaagtaagcaaataaacgatgtgaatatttttaaaaaggagatgtgaagagtgtgatttgaaaggcctactctagattgggtggtccgagagtgcctctctgaggaggtgacattttatctgagtcctaaaacatgtgaaggatccaactatgcaaagatctggatgcagaccaaaaaaaaaaacccagtaaatgtaaaggccctaaggtcatatgatcttataagacttgtcaagaatagcaagaacaatatggctggagtgtagtgaataaaggggacagtggttaaaatatattgaagaggtgggcaggggccagataaacctacagtcatggtgatgttttccaattttattctaagagcaatgaaatcattgaaggattttaagcagaggaatcatctgtcatagtttctatttaagacaacttctcaggctactataaggaggatacgttataccaagtcaaaagagaaagcaggtagattggttaggaggctattgcagtagcccaaggatgaggcaattgagccttggactagagccatatcaatggaaatggtgaaaagtagagagatttggggtgtatgtactacccagcaaaggagacacttagaagtgacgtaggatgaaaaacagaatagtgggggttttgtttattttttttaaatagagatggggtctctctatgttgcccaggctggtctcaaacccctaggctcaagttatcctcccgcctcagcctatgaagtgctgggattacaggaataaatcactgtgcccagccataggatagtgttttaagaaagaaagaagggtcaactaagtttaatgatgctgagagataaagttagatgagcacaaacaaaaatgtggccacaggatttgcacaataaagattgttgttagcttcattatggaagcatttcaattgtttggaatggaggacaaattcctgaaaaggatatgttgaggagtgaataggaggtgaaggtgtgaagacagacactattaaaaatgcttaaaagaagtttgaagggaagtaaattaatgatgcctgaaagtggctgtagggtcacagaaattgttttgttatgcttagcatatttgtttttaggatgacagacgctaaagtatatctgtgtgctaatgaaaataatgtaaaaatgagggtgaattgttgaatagtcaaagataaaaatgacagaagcaaattccttcagatgatcacagggtacgtgaggtggagtccatgagtggagtcttttaaaggacataggatacctctcttagtagtggaagagaagacagagggtgaaagtgcaggtgagtgggattgtttatgtttaattctattgcactaaaagtgattacatattccctgaggaaggagatcatatctgttttattctccattatgtcttcaatggtcagcgcatagcatgtactagacaaattgtaaatactcaacaaatacatctgaaagaaggagtctttcccaaggatgtagtttattaggtccttccctcagtatcttttcctaaaacaccaaaaactttaagtattgttgggcaaaacagtagcccaaaaacttcaggaagttcatggccaatgtagagggagtggcactaggcttggagttgggagacctagatttgagatgaattctgatttatggatgtttgttactgtattctgtagctgcatggagaagctattatttgtggagcactctgccaaatgtataaaatatattttcccatgtttaatatttcatacatgtatgctaattaattatattagaaagatattttttatattaaaaaacttatacttccttttattttctttccaatataaatctgctgcttagcatagaactactaaaaattgactttcaaaatgatgatcatttcattccagtatgctctgaactgtaactctaaatagggttttagatggatcaaaatgtaatattttatgtcctgtgctgtaaaagggattaaaacaggtgtttctgcataggaggatattaggtatcatattgcataaatatggaagaaaattgattaacctagtcttgctccaaatatagcctgaatcctgtatgcttttttactccatatttatagcagtcccattttcctcatcacctcatttttctgttttcctttgcttccattccattgtgtaaggcaatttttattccattttccctcattggtttttgcccttgacattctatgcaacatttagccatgaaagcagtagcattttgaaggtgggtttcaaaagcaaattatttcatccaagtactcctaaggcactggaaggactgttgctgagaaaatctttctttatgtattgttaatactctgtgacatttttataattcagagcactcacatctttacattatttattatattgtgcataaatgagatttatgcacaatgtaataatactttggttctataatgctttagagttttcaaaatagtaacagctgtctgtattttaatcatctattaatgcttttcctattttaaatagttgtggtgaagaacaaatgggcaaggtgatcattgttatttctgttttatacagatgaaaattgaggcttacagagggcaagtggcttgccccaggtcattcagctagtttctgcgttctaagatcaatgatcattctgcatattgcattgctttagtagaaggttctattttttctcccaaatcctaaaactctaatatgtaccaaatgcatccacatgtgtatctatattttattcttacctctttagtaatttcatgcctgttatcatttatattcacttctaatatttgtggttgattttctatagagtgtgtctcagatgagtttgtaactagacatcaaactttgtcaagataattacagtgtaatgttagttatgaactgtatgaatttcccaattcatacagatttataatagctttcattaaaaaaatatttttagttctattaattttctatacagatttcattatttagtaatgaggtaaaatagctacaatatctttagttttaccttttactaatgaagtctaaaacagtttatgaacccatccaaccttggaagtttgataaacatgatccatgatatccatatgttatagcctaatagactcagaatgttctatagttaagtaggatggaaagagttataatttatgactcaatctgatgtttcattcacagacaatgtgatgccacctaggcataaaccctaaggaattctaattgtgaatttgaaaacaaaacagatcatatcactgggagggacctcatagatcatgtagtcaaaccccctcatgttaccggtgagaaaactgagacacagagggagtcatcaggctgccataggtcacaaaaccagctgacagcaaagtgaagatcagagccccatctcctaattcccaagtgagtgctgtttccaatatgccacattacctcccccagcaagatgcctcccatggggcattgcttcttgaagatgaagtatattaaattcacatttggctgctaatcgttttctcagcagctctatggtatttcattaacttctgcatgtaacaccctggcctttcacctgtattaacttgagctcattaaacttgaggccagtaataaacaggaccaaactaattcagatattttgcttggtatgtgttcagcattttttttaatggtttctactgtgtgaaacattttcccttcaaaatttgtggaataagtaaaacaggaagcatagatttcaaggaatggagtatgtaggtagtatgcttctttaaataaataaagagcatattaaacacctaccttatacaaaactttgtgaggactacaaagaagtatgagtggcaggatagcacagagtctatcaggcagacttggatttgaattaattgtagcaagttacttagtctttatgcccctcagtgttgttgtgtataaatggacactagaatacccaactcatggatattctttatcttctttgcaataaggaagagataatgtactcatgtgctttgcaaagtgtctggtatatagccatgatcagttaataagctgatatattcgtgaaggtgatgatgatggtgcagttccttccctctcccttgttaaatttataatcccctctcagccatttttgaggaaattgattttccccatgtcacctcccctacctcatcatctctacaaaatataagcaaaggtcctttagaatgcaaggaaagtaaaactaagtcattttacccttcccaggttgtccaccaacattgctttatgttccttttgactaagaagtaagtctttggcagctcatagactatgcaggccccagttaacaaagttcctatgtaattttaaaagtcaagaatctgattgagcaggggatggtgataaaggaggggtcatctgcagaaagatgaccaacaaagaggtggaaatagaagtctgtcaggaagaatgacagcatgcaggagtttcaaggcagaagccattgtgagtcagggtgaggcagtcagcaggcagtgtgggagtgaagatcaatattggagccttggtgtggggacaggtagtcagtgttggttctctgtttcccgaatactacgtgtattagagttctccagagaaacagagccaatttaacatattagattccctcttatatatccatacataactaataggttatatattcaattccctcatatatctatatgcagccaattggttatattattatagccaacaggttataggttatatctgtatgtaacccattggttatatataggtatgtaaaagggaatttaatatgggaattggctcacgttgttatagaggccaggaagtcccatgacgtgccatctgcaagctggagaacaaggaaagcttgtagtgtaattcagcctgactctgaaggcctaaaaactgggggagccaatggcatacttaactctatgcctgaatctgcaggcctcaggactgggagatgaggggggcagcagatggtggaggagatggctgggcgagtgctataaggcctacagtccaaaggcccaagaacctagagctctgatatccaagagcatgcgaagatggatgtcctagctctcactccagaagaaagaataatttgcctttcctccacctttctgttctatgcagtccatcaaccaattgggggatgcccgcccacattctctttactcagggcgtattttctttacttggtctactgatccaaatgctaactgcttctggaaacactctgacaaacacacccacaaataatgttttaccagctccctgggcatcatctcttaacccagtcaagatgatatataaaattaaccgttacaccatagaacccttttttaattttctactataacagctttgaaaataatgatgaccttagaactcatctagttcactttcctaccactaccagaatcccatctccaacattctggatgattctccctttttgctaccgccatcatcctacagtccacccttccttctgccactatgaggatctggtcacacattttcaaatatctggtgttcccatacaccctaaagaataaaatccaaacactttgcccagaattcagagccctatctatagatattccagcttcatcccccactatctccctgacatttagtatattttagccatataaggataagctcatcctgtagttccttcacttcatttccttacttctcttctcctcctacaactaggcactgctttcccctttcagaatttttcagcatagtttaaattcctccttcactgtaaagattgtattaacctctgagttggaattaattgctcattggatctgggttacatcagattgtttgtgcatgtcgtcctctacttatttctccttacaatgacgtatgtaagccacatgtcagctgactttacccagtcctgtccttctggaaattgctaccaaatccccagagattctgttctctaggttgcttctggctataaattccagctgtcattgaattctgaatctccctcaaacctccctcctgttggtttctattcttttcagctatatgccaacccaaccatgaaactcaaccctgtttccctgattttcctccaaatgtctcaccaagacatgtaagtgtgtagcagatgttcttagataaagactatggaggaggatttagattggagcaatgcaaacatcttaaaattaaatagtggctctccctgtttataaaagtccttcagcctcataccaacaggctgtgctccttctctcttgccctctcttttcacacttccttttaccctctcctctcttttctattccccctctccttcaaaattctacatttctccatgcataatgcttggaccatctctttgttctggtttctcctaaaacatgccatcaataccacatttcctaaatcccaacctagaggtatttcttcaaaaatacttactttaaaaaatgacagtttttaaagagagacctgatatgagttatttaaattgtttcaatatgaaaataataatgttcttatctgagttcctttgaatatgactcaatcctcttcataaggctataaactgcttttggaaggaacagcctcctggtcctctttgtggcctgggccccagcacctgcacagcacttagcagaaagcaagtcttatttccatcatcctttgctggcattccatgaatgttagactttcttctcttgattgacattattcctaattcatgatccgacttcatcacttcacaacaaaatgtgttctgcctgcttttcacaggtgaagtgcctcaccctcttgtagcttatgaacgatggaacagagggttagcagtccattggctccccggtgccttttccaaattgtcacccttctccctctgctgtttattccacctggaggattctcttcacctttcctgacctcacgcctccactgcaccacttgccatcctaccttcaccttatccttcagagtttagctcggatgacacctcttctagaaaatctctgacccctcagcctgcgttagatacacattgtcactgctcatataacagtttgtgtcacttctgccacagcccacagggtattgcaattgttattaatatagtctctttaaggtcacacactatcctttctatataaatttcaagtgtctggctccttataaatgttttctgaatgtatgaatcacagcttttctgtaagtacgattttttacttcatgtcatatttgaaaacctatttatatactttaatttgtttctgaaagtaattgtttgggattgtttgacaattcaaacaaccagaaagattttgtaaatatattcaagatattcattcattcatttattcattcattcattaagctttgaaaaattatattcagcacctattatgtgctggatcaaagttacctgtctaggatctcaagctgggcagatggacacataagctaatgatgataaggcagtgcagtaggcacagagattaaaatatgcccaggatattctaaaccactgggcagggagggtaatcggtaaaggagattacttaggtgttatgaagactgagctgaaactaaatagcctaattggcatgtaccaggtgaaaaagacaagatggggtattctggcagaggggatgcatgagcaaacatggaaacacagagcacagtacacaatgcaatagaagcagttaaggcttatgggaataaattggcaggcatgcattttgcaaatattattccatttaatgcttataccaacatcgtgagtttgatactgtcattctcatttcattgataaggaaaattagtagcagaatagtaaagtaattggctcatagtcacacagctaatgagtgcaaaactgattttaatgcaaatttgacttctaaattatttccctcatcactatgtgaatgttgactttctactttcactatgaaacatgaactatctctgcttttgaccaatttagatatcacatatttgatcaaaagttgtagcttacatttatcaggttaaactaatactcatatttcatatattttacatgtccaatgccagtgtactgatttgcatcattagccatcacatagcactatggtaacgtgtaatatgtagatggactttctgtctctgtctttttattgtgttccactgtccaaatttgataatatcatgaaacattgcttactgttatatcggtgattaagcattacatgccacttacatatgggaaaatctgagcttctgattctaaaccatgctaaaactgattttgaaataaaaatcagcatcaaatgtaagtaactgattactttcataattgaaaagaggaaagaagaaaagtaactgaattcagaaactacagaacagaaaagatacttctcatctctatctcctgtgctaccttgaatcatgctgagcagagattgaaattagggtgagttaggaactttacctggattactttatttaaacctcacaatggccattttatagataatgaaacagactcagagaacccatgctctcaaccattataccacactgctcccatattttttattttaggtatccaagaactacttcaattagctttttgaggtttttaaagatcaactctttgaacatttattttcttcatttttctctgcaattattggtcattttattgagttcaaacagttttccaaggagtctggcatattattccttgagataactgcaacaaccaggtatatttgacatataattcaatctgacactagcccttaatgaatagcaaaagatacttacaaaattaataacaatgataatttgtactacactgtctggaaattgtttagcctttagtgtagcacaggacagttcctggcccagagtggatattcaatactgtatttgttgaataaatgtcaaaagactgataaataatagagctatgtcatatgcaaacatgtcttttgggaaaaaaaagtcaacttttagatatcctttacatgtaacttatcctttagtctgtcagttgtatagacacacacacacacacacacgaaataggtataaaggagatagatagatagatagatagatagatagatagataatagatttcaggtttatactgaataagatacatatatacatatatatatatatatatatatatgatactgagtgatatattctgatataagccggaaatattttcatctttcacatattacaatttagatatcaaagtaattacttgtcttcttgttatggtttccaattagataagagagtgtgattaagaaaataaagttgatccattacagtactacagactagtgctattaggcaacttgctgccattctcataaaaattatgcagtttaaactggaagatacaagtgcttgcttctattacaaacaagaacgcttttctacttcataatatgctcaattaactttagattgatccatgaataaattataatccaaatagacttctttaccttaaagctttgctggcttaaggtatcattgttgattcattatgttgtcacttttctatcggcaatgtaatgctttttttatatctggatagagacagttttagtgtaagatactgttatctttaaatgagtaggatttagcctttctggtgagaacaaattcatcaatgatgaatccctggagaaactattgaaacaaaactcacaccatttctgagctttgttcagttcatcagttacaaagcagcttttgatagtcctaaagaactttttcctttgtttaagaaatatagcatgacgctcaaaacctctcactttgagttaccgcaggctacaacttttctgtaagaaaataatgaatgaagaggaaaagctcctgctgctggcactgtcaggtcctgctgcttctcctcctgcaataggaaatcaattaactatatgttcaggcagagatttgaactaaatgctttattaatcatcactgattgcacacacacacagtggccaactatgcattcatcttcactctttcttagctttgttttgcttgcttgcttgctttatccttcttcctttttttttttttttttttttttgcaagatcaaaacacaaatgtatgcctaaatgtagtatgtgtaaaggtgatcggttgatcctttgttgcgggagagaattgatgtttttttgttttcggaaaactttacttttaaaatgttcagtacttaaatagccttaggaccactttaatatatacaacatattttttaaagcacttaaattttcaaactaataaggaaagcaaaatgtctacagcagccttgaagttttggaagctggtactataccttagtctctgagagctccatgtagcagtgaggaattaaacaaaaatgaacccaatttgatgtggagatgcttggtggaaggtggaaggagcagtcactgatatttggtatttttttttttgctttcaattaaaaaaaattggcaagttttccttttagtccattaattcttctaaccaatgcacaaagaaaatcctgtaggaatctttatgttaaattgagattctctctttaggactaattataaaaccaattagcacattagaaacttagcatgttagccaggggaaggctgtgtaacataatttatgtatggcaaatgtggtcaatcattgcaaaaaatgacagaaaatatcaggctgttggatatttacacaggctgtattatattcagcatcaaaagattttcaaaaatttattgttcttattaccattgttgaaataatttgaaatcattatggtttaaatttaactacattcattgtctgcatttggataaataataatctaaatgaaaaaatatactatcctctgatgtacatttaaaggaagatagattaaaaggttgcaagaatgatttcttttgaatggcctttacaaaactcttaggtgaaattagatgatgttgagtaaggtaaagtccaaacagagaaccatgtaaaccccaacagggaaaataatggttccgattttcatggagcctgctaacctgaggcatctgctagaaccagaggtcatatgtttcaacacttaaccgttcttgatagtctttgagtatattagattaggattgagatgcccctgaggtataagagaagcacgcagggggtgacattctgaagatttatatcatgtggacgtgtgctcgccaccttatgtggtgttatctgaccccaaaggcatttttttggcaccaagtgtaatccctaacacctcatatacctcatatgccccaagaaaaagccatttcataaaagcattgtcttttaaggatgcttatatatgtgataaggacttgttttatactcttatttattttatgcttttagcaagtcagtatcacttgttttatagcaaaatggatacaaaatactatctccctccatcctatcatttcatattactgcaacaattaaatattacaaattaagaaagcattaaggtgtagagatgaagtactcagttctagtctcattgtatataaattagtttggcattcataacattgtttccatttacttgacttgttgacataattataatgaattgataatggaagtaacaatcttagatatttctacataagtatgttctttgctaacatgaattacagttgcagtttgcagttcggcttaattggaacatggtttaagtttagcttacctactctactgaggtctctagaggaccagagaactcattttcctggggcgttatgcaagctgaaatgtggaggccagtgttttgaaacaagtgtgatttttcaccaaaatacttgctaggtcagagatcaggatgaccttcgagtgctgtagttttccaaacctccatcagctagataaatggactttattctgcaggagagagagggtatttttgcagtcttatgaaagagacctaccaattccaggttacaggccgacacaaaacatttggaattcagtgatgtctatcaccagcagtatgtgtcagtaaaagtgaagatcaaagtttctagaagaggggaaggacaaagtgaagagaaaataattgtgggataatgaatggtatgagggcattttcgtgttaacttgaaaccacttagcatttttccatgacgcccaggtatctttctaaatgaactttgtaaagtacaattggataaccttgaaatttaaagctccgtgatgtgattttgaatactgatggagtttgtttaagcactgtaatatttcctctccttttcatttctatttttgcctccatgcaaaataaaatttgttttctgtacagagaaatcaatatttttaccatttttgtttttcagctattccagtaagttgcaatcaacattagttacaatctttaaagagatgtagtaagaatttgaacacaataaaatagagatacagatgagaactttggcgaagtacctttgctattgacaaaagcatttgtcagggactacaactgtgtctatatcatgctaaaaacctgatgaaggggaaaaaagcatcaataggtttcaccttctgtctatacaaaccaaacaaatggtttaactaatagctgttgttttatgtgaatgggtttggtttgccattgtgaactttcttccatttagaaatgtattttaattaacatttgtatatgtaatacatacatatttggtaaaagtattgtactgttgtgttctttttaataattaacggaacctgataccgagaagactagtggtccaaaacaatgagtgaagacctagttacagtatacatgaaacaatccctagacacacatttgtttgttgataatatttatatgtttatatcttcccatttttctcttctctgagctaacatgcttccttatttgtgtgttttccttttagaaactgccaagttttggaccttatctggaacagcgcaagaaaatcatagcagaaaacaagattagactgaaagaacaaaatgtagctttttcaccacttaagagaaactgttttatccccaaaaggcctattcctaccatcaaggtaaaaattatgccaactatataagtatgcctactttactggttaaatatacaaatatagttaaaatgtttatttactgcttaaatgtatcactaatttggttttagaattataatgaaagttttaaaaacatctgtccatggtgaaaactgcatttaaattataaaataaccttttttatttgcatattttatactttttagaacactggcaagcatgcatgtcatggaaatttttatatacattaaatgtatcaggagatattaagatgaaattcctagttttcttatagtcacttaaaaattattttaatacataattaactccaagatatcttgtattagtcatgtagtacaactcaattatcaataagcacatcaatatcaatgtgatcacttgaaagttttggaaaaactttctctggtttggcctctggaaagcctggacatttatttgggtctcaggagattattttctggtaataacaaaaattacactaagatagaattatgagtatgtgttacctttcttgatttttttccttaaacttttcattttgacagaaatgtagattcacatgtagttgtaagaaataatacagagaggtcttgtgtaccctttatccagtttcacctgttttgcatgttgcaaaactatagtatgataacacaaccagcatactgacacagacacaatctaccaatcctattcaagtttttccagttttacttctatgtgtgtgttgtatttagttctgtacaattttgtcatgtatggaggttcatgtatccaccaccacagtcaagatgcaaaacagtgacatcaccaccaggattcctcaggtaacccttttgtaaccacgccttctttttttctgtcaccctcaagacagtattgtttccaagcagtcataatgagaaaaatggaggtgttactggatggcattctgtctgaaatcatcatcactaaaatgtagtttgcagttactgaaattcattcttctgtgtttgatgacactctactcctacatctccattttctgtttgaaatatcagctgaaaagcttgcttttatgtgttctcaagtagacctcactgaaattcatctttagcagtcaactggagactggaacccttaaaaattccttctacctatgaagaaaaaaaaaatgtatctcatgctaaaaacagtggtccagactcaatgttccaaaatttcagcaatacagagttccgaaagggcaaagggagtggctgaccacaaagcgtgccagcacttcaatgccatcattctaaataaaatgaacatttgggacttttaacagcataaaagccccaaatcgtctcttgagttgttcatgttaaattatttttgtgccactaaaagtatgaactgaacaaactgaacactaatggaatgcgaaggccagaacctacagcccttcacgagcctttttgccaatgtgtggctatgactactatatgatttggagatatagtgtgtctggaattggttcctgcccaggggttcatggtctcgctgacttcgagaatgaagccgtggaccttcgcagtgagtgttacagctcttaaatgtggcaaggacccaaagagtgagcagcagcaagatttattccgaagagcgaaagaacaaagcttccacagcatggaaagggaccccagcaggttgccactgctggttggggtggccagcttttattcccttattgtcccctcccatattctgtttttgtcctatcagagtgcccttttttcaatcctccctgtgattggctacttttaggaccctgctgattcgtgcgttttacagagcactgatttgtgcattttacagagtgctgattggtatgtttttacagagcactgattgatgcattttacaatcctagttacagagtgctgattggtgcattttacaatcctcttgtaagaaaagttctccaagtcccactggacccaggaagtccagctggcttcacctctcaataggaattctcccagctttctctctcttcttaatcaatttgaattaaatgtaaaatctccatctctaggcatcttttccttaggtgtaaaaatttctaaaggaagatattatttatatttgaaataaaagaagtgcaatatgattatgaaagcatttttaccttttctagccctcaaatctttcagagattgtatattaaatattgataacttagacaaaaaacaaaacagagcaaacaaaaaatctgtggttgcatgaaagcctgtagatcattaatcaaaaaaaaatcaaagtcagaattaaaccaaagaattgtgaagtcttggatgtagataaagatttctgaagtatcaaagaggaataaggcatcttattaaaaatagtgcaagtttatgttcctctcctaagttgtcttactttggaggttatccagagtgaaatgtccttggtgttacatgttacataagcctcaagacattgtagataccatcttaccagcatcttagaccttatcagtgtcaacatcttaatgggcagctgtggtagattttctcaatgtctggtggattttccactaccttggccttctccccagaatgtccatactcattccacctgttgtcatttctaggcagatgctgtgccctgtcaaaaaacaaaatagtagctgatagtggcgaggttttcggggaagcaagcattttcagtttttataaatgcagttatctctttagaaaattagagattaaatctgttataacaaataactgtattataaatataaaactgtgtatttatatttatattatactataaaactgtgtgtgtgtatatatgtatatatatacatatacatacacacacagaagctttaatttgtgtaatcatctctagcaaaggctcattttgtgatttttgccgtttgtttgcttaggttaaccttttctaccataagattatatcagtatttaccccatctagttgttttaggattttaatatttgtattttacttcaatttctctaaaatttgtttggctctaaagtatcatgtacagttataactttatttttttccaaatagacagttgttccaagacctcaatatttgcattttaaagggatccctttcatctctcaaattataattcagtgacaaaaatgtaccataaattgcatcatttactttatattcaaattttcaacctctcaaagttttccaaaacttttcaaggacaaatcaaaaatgaattagacaaggttctaataaggatggtcaatctctagaaaaaagttttatgccgtaagtaattatttgtgccataataaacaatttttaaatctttataaatgaaaacttctaattaaattcaaaattctgggttctaaactccttatttaattaataccaaacttaaaataccccttttacacttctacaaaacaaaattatttcttgtcctgtagctttgatcctttactttgaaatatgtttaatatgattcctttttccttctgatattaacctcatggaagaggtaggggaaggtgggccttgagaaaatcactgagttcagagagcagcgtgtagtctcatatgatggaagctgaagaacaggttggggaaagtagaaaaggattgaaagaacatgatgttggtgtctgtattcacctctctgcttccttctctctgtataatcttcctttatgataaatctaaacgtttcctacacaatgactcaactattctccatccgagacatcttttctatacttcagacttgtgtcaccatatcttggggtcacctccacctgcatcgtctgaccaaggaacccagtagccatcatacttagaactaaactgattcccattccttccaaacctgctcttcctcctgagtcctctgtctcaatgaaccccatcttacctaactcaaaaagctgcagttcagcctggatgtcatcttattactcatcctattcacaagctagtcagcaatgactattgttcttatctcttacatctccctcctcttacattctttacataatgctgaggcctcagtgtgttgcttacgtattctttcctggaattctaaaacattatattaactgtcctgctttcttttgtcctccttatctaatccattctccaactattatgaaggagtcttttaaaaatgtaggactgtttgttttatcccttgcttaaaattcccccattgtaaccgtaatcctaaggtaagctccttagcataaccttcagacccatcacattttagcttttcctgacccaagaagcagcttcaatggaatgatgagaagtagaatccaggaggtgataatttgaggaatgaatgaagactgagaaagtaacaacaaagtgtgcagaatacactttcagtaacttgagaaaggtcagtaggaaagggataagaagaggaatcgagtagaggaaaagattgttttgtttatatgagaacgatccaggcttgcatatgcttgcatatgtttgggagagaatagctgaagctgccagaaagggcatgattaaggaaactacatctttggcaagcagagagggaaaggagtctaaacaatatattaagatatcttgcataagaggagagacgtgtcatgaagctgaatttggacttcccagtgtcattttaacaagcagacatatttaaagaaagtgaccataaaaatgtcttcagaaactattgccctcattgaaatacaaagcaaagtttgtaaaattttaacagattatatttatggtgaaagaatttcctgaattaggcatgggactactctgtcacactgcctaggttcaaactatggcattgccgtttcatagctgcatgaacttgcctcagctaactaatctgtgaaatggaaataataaaagtatctgcctcatagagttataaattagatgatgtgtgaagtgcttttagcatggtgcctgcaccaaatgtgtcctaaataaatgttactattagctataatatttgaaatgaacagtttgaaagaaatccacgttaagatgactattcatttccattttgtccaataaaatgaactgaagaatgaaaatagaaatacataaagctctggaggccaaaaaagttggaagttttgaagaagcctatgtatttttcaggaaatctttattgcatacctaccatgagataagcaatgcactaggaattgagcttctgcagggcaataaataaaacatacacagcttctgtcctcataaagcatacagaatatagaaagagacagatattaaggaatcacactaacaagataaaattattttttgatatgagctacatagaaaaaatgcaagatatatagaatctgtttcatagtgagacctaatttagattgaaggggccaatgaaagcctccttgaggaagtgacatttaaggagccctgtagactaagtagagattagaagggaatggggaactgagaatatttcaggtatgccataatgtggtcctggatttggtaattggctatggtaatggaaacagagatgaaattaataaagtcttgttaattcttcctccaagagtcagtgattctcattatattaggcataggtatagtaaagagctgataataagaagactaagatgtccagcttttttatggttccacagagataaagaaaaataaaagataatgagttaaggttttgatgttagtgttttaggtttgaggggagtttggggtgtagcatgaaaaacttagatttgaatgtattgaaattgataaaggaattatgggcctatgctggaggatataaaggagaaagagctgacatttccaacgcccactgtgttccagacccaagatagaagctgcacatgtattttcttatttcttacttaacctaatactctatgaagaagtagggagttctggaggaacaaatgtgaagaagtgatcaaagaaagagaaggataaccaaaataaaatgatagtgtggaagaaatacaaaaaggaagtcttaagaataggaaagtggtccacaaggtcagaaagcaccgattgttttaccaatactttgtattgtttcattttgtctcgcatatgcaatcaatgaaattccacctctagttggcaacagttgtcaaattcatccatgtatgtttcttaatttgtccaataatctttaatgtgcaaccactatgttccggtactatagcagtcattggcacaatccagtagtgaaaatcccagctctcatggagctcacagtttagtagggagaaacagacaatgacaaataaacagatgaatacataatatgtcagatggtgacaagtgtaatggagaaaatagaacaagcttaggagaataaaaattactagagagactggccagggaacacctgcctgtttaatggcatatgggcaaacacctaaaaaagtgagggaatgaatgatgtgggtatccaggggaagaacactgcattcagaatgaacagaaagtgcaaagaccctgaaatagcaaagtccttggcaggaaaccagtaaggcttttagaaaggaagactgatatgatctggcttatttttgcaaaggatctttctggctgcagtgttgatacagtttgctagaggggcaagggcagaaacaaggagaccagttagaagctattgtaacagtccaggcaagggattggcaggagggaaaatatatactggataatgtcagaaggcctcaactccattgttttaaatgaaaagatatgtgtgaaagtattatacacagcacagctctattcaaattctaggagccacagttattgtcatttttatacaagtccctgccattttgcccattatttcagaccacatctagatgatgtggctgtgtgatttttcagtccacgttgatattaacggccacattccctttaaagtcattttctgtctgcacatgaatcagacattgcttcttgtccttttattgtggttgttattgctgttttttagcacacacccaggcacgccatgtaattgctgctacatgattacttcagtgttttccctagagtgtttcttctttcttgacataccatttttcctacttccctttttcctggaggacctgggttatctgttttcatgcttaatattttctctgtccacccatctgtttattttagcttgtttcttccctcctctctgctggcctctttatagattcctctgttcgatagtttaaactccatgacactgctttgtttatcctctcagcttccacagcacattattccccatctgctgtagaaagaaccccagtgtcccacaaagttaactaagcccctcttgtctgaacaagtttttcagtcatgcattcaagtttctgatctaccccatcttccctggttgggaatgcaacaataatatttctaagcaagctatgctcagtagatctcatcttttgttcttttttcctttcaaatgccttaatgacttaatggtctatttcttcagaggtaggcagtttcaatatcagtcaatcagcaagtatgtatttagtatttgctgtgtgaccagcagtgtgctaaggactgcaggagattcaaaaaaacagacacggcatggtccaaggctcaggatgtttgtaatctcgatggagatgtagtgctaacatatatttattatgcacttgctgcaatccagaaattgtgctagaaactaggaatacaacgtgaattttaaaaagaaagacgtctatccttatggagctcatagtctagcaagggagaaagacacatgttaaaaattatttacagttcaatcaaatatgtacaaaatgctctgggaaaacagaggagtgaaagggattagttctgccttgggtaattgtggaaagcttcacagagatggtgatatttaaaatggagtttaataaattagtgttaattaagcagagaattaataataaaagctaatatttattgagtacttatgaggtttcaagcatcactacgtgcttgcgaattagctcatttaatcctcacaataaccctctgtgctattatggagtaagcaattgataaacagaaaggttaaataactttcctaaggtcacacagctaggaagatatcaaagccaagatttgattccaaagggtagctctaaaccttgggcccttaagcactgtcctctgctgtctctcatgaaacatagaaataagaaagaaaaggaaggtggcatttcaagcaaatcagtatgtttgcaaagcacagtattcaaacatacttgtaataacctgcagccatgggaccttaaatccaatacataatccctggatcaagcagatagtgacatcaaaatggtaaactcattcttttgttaaattggaattcatagaaagcacagaactgagaagcaataatgaggaaaataactgggttttataaatcagtattaataacagaatataaaaaagcaatgggatcaactgattaaactgctatgaatttcatttgaacatcaagcatggttatgcccagtgttatccagggactagagagtccttgagaaccagaaatctttgctagacaacatacatcctgattctcctagccccttgaaagtaaaaaaaaaaaaaaaaaaaaaacaaacaaaatggcctcagaggccctccgtcctacccctgggaatgatctggggccctggggacagcctggcatctgcatgatttcccttttatcaacaccacatcttcatttccaatgcataatagcatagcatttaccatgcgtatggcccatattatgaagctaccaattccataagggaaacagaaagaaaaagattctgaggaagaagagggtatcaaaagaagtactggaaggctgatgggaaagaatgagataaaagaagaaaaagaaacctggcctcctgcaatgagtataaagatttccttctaaaagatgaacaaggaccttctgaagaagctcctgacatattctacaggttcacctgtgctagagaaaagaaaccagacaatgcctcctacaggaggcagtttcgtttcctcgctgagagaactgaagtgacagtgtgcacatttggcccagttaaatgagaaacgtgctttattcccaggcagcatataacagagacttgagagtctgccaagacttataaagtcccccgaatgctttccacttctgttgatatatatgagaatgaattctcattctctttatgaagccgggaatgtatctctaacgtctttgaatttctgcgtaggaaaatgaatggtttaggggcactagtgatgttttcatctcttcttcctgctgcttctagtaagagatggactgcatctcataagactggcaagacagtgttggcgggacaccagtcagcctgatcgagtgctttattatttcaattgaattgtgaaaggaaagagaagagtactcagataaaactgcaagaccatattggatactatggagcataaacaggagggaacagaaagaaaaatagtggaggccttgcccagcaatttccaaaagataccagagaaatgggctgggaacaaggttaatattctcacttgtccctgtaccaacacatagcagatgaaaattatcaaactgaactttaaaaactgaagagaatttggtaaaataatcccttaagtcttatggggatttgtagaaatgtgattcctgaccagattatggcatggaaaggtgtatcttgtctggaataaatgggtctgatggaagggctaggggagaagcagtatctatcaaaaaaattatacacatgcatggaaatccacaaacctcagggtggagtatggaggaagcagctgcaggagagtgaaatgaaagaaaaacaaaatgttaccctgggactgcctcagagaccttgtaaccagatggttaatagggacaggcaagacagaggagtgatgaaagcctttgcaaacttcagatggaaatcccactccactaaaggcaaaacatcggaaaaattattgaattgccttgttggaaattcagtctcacaaaagagagacaagtaatgaggggacttgctgctttggcttatttctggctaaaaaagtctgtttgaagaaaatggcagctaaaggaatcttgaaggaaagtaaccattccacgttaacttagagtttattaggccaatgaaaggaagtctgagcttagaaatgcaagtatcccacctttagtaaacctaatttcaggaagttcagagaaaacaatagatattatcttatagtcagcaactctaacctgaagatggatcaagaaaaatgagaagctgacaagtacaaatttgattatataatcactaagtttcctaagaagtaagaaaaaggttatgcatttagataactcagtgtttggtgcttatatgagaaaagacagatcacattaccaatgatgaaataaaagggtggcatcaagatttaaggacaggtcagaagtgctaaagcctcaaatgatctgagtttggagaaaatattaggaaaaatagcaacatattttgtctattaatactcactacttagagcaggtggtacactgttaaattataattagagagaactgtttgactcctattatctttctagaatcccataaagaattttatcagaactaaaaagagtagagaaaatatatttgagagttaaaacctaagatacctaaggatattgtagaaatacacttaccttcattaaatgaatttaaatccaaagtgtcttgcaagacattaccactttaaagcctgagctcatcccagatagaaaaaatacagtgatcagggccacagacaggtactgaaccaactttgctcctggccaatccttactcatctgactctctcactaataatctccctctcacccaagccgctctcactactttggttccaaaagtctcacttgccgctattccatctcttgatttacttgcttctctcaccctcgccggccaatctaatacttcattttctggatcatactttgtctctgccctctgctctcagcatattcaagccgagtccttagttattagagttctgccaaatttaaacttaagatgtccttttcttactgtacagtactcctgtctgccttctgctcagagggcatatatagaatatccagaataaggcacctgctatatttttaagtgcttttgtaagagatcactataccacactgatgaaaaataaatgttgctccaggttctttcccaaagaaaaaggtggatgttgtaggggaagtagggaaaagatggaaacaaatcagaaagattgagatctaaccccaaaggaatcctacaaacgtcattcagcttttgacttgggagcattagtaaaggaagaagttaaaaatcagcataaattcagtaagagcaaactgaattatctcattttctgttttgaaagatgcattaggcaagaagtgaatataccataaaaagatatgacattggtaatggtacagataaggaaatagttaaatgattaaatagctacatccaaataatttaaatattgaatgtttttgggttagaagtcatagtgactgcccacagcatgctgttctgggtcctggtttttgaaggatacttatttgcagaagttgtacaaagtgcagacagtcctgacctacaatggtttatcttatgattttttttttattttacaatggttcatattaagaacttaacaatggttcatcttatgatttttctttctactttacgacagtgtgacttacaatggttcatcttatgacttttgttttactttaagatagggcgagagccataggcatgcagtagaaactgatatgatacatgctaatcaaatatgaagacttgaagctagaaagaacagctaacatgctagataatcacagtttgaaaatacttccatcagctattaaaaatagaccaaaactaataaattaatattagtcgtaataaattcagaatgaaacatcagggacggaatcagggctgtctagttcctcactctttggccttaaactttatatcaaacagaaacattgactggtctattaaaaaaaaaaaaaaaaacttggccaggcgccgtggctcacgcctgtaatcccagcactttgggaggccaaggcgggtggacacaaggtcaagagtttgagaccagccgggccaatatggtgaaacccggctctactaaaaatacaaaaattagccgggcgtggtggcgggcgcctgtagccccagctacttgggaggctgagggaggagaatcgcttgaacccaggaggcagagcttgcagtgagccgagatcacgccactgcactccagcctgggcaacagagcgagactctgtctcaaacaaaacaaaacaaaacaaaacaacgacaacttttaattatctcaaacaagtaataaattgataataatgggatcttggaattctgtagtactttgcaacatccattccttgaacacctacattaaaattaagtgttatcatctataatttaaaagatttaacattgctttctccacatacatatctacatataaccatttccactaatcagggatggctacaccatactgctgaaccttcatacatccaaatgggtgtaataatgaattggaataatgaatatgggttccctgatctccacagatgtgtgtacaagaggggctggagactagccatatgtgacttactgattttatgcatctttcagccaactccagattccaggacatctactcaagggtattcataagctggtagtactacctggaggctttgggattaaaacaaatgtccacattcttagccacatggaataattttttttgctactctttcccaaaatgatttaaaatagttgtcattcttttatcctcttccagataaagaaaaaaatataattttcttaaaaaattgtacttaataagggatgaattgttaacaccatgtgctaataacttctagaggctccacattggcttcacattaaacaatgatgttttaataaatgacaaaagcaaatctccaatttagaggaaaaggcatatttaatgtacacagaatgtggacttgctccacgtaaaatttctaaggcatatacaacgtttcttttgaagaaggcttatacacttgttgactgcctagagagtttcctgtataatcatcatttgaatatttattgatgattttagtcaccattatctgattcagtgaaacaactctttgggttgatttatttactagatttaaaaaattattttctatcacatataaatgggcttttacagccagatagtgacctcttgaatttattattttaaaatagtactgggaaatattacacatattcagatactttgactatgattattttgtatttaaaatactcatatcaataaaaatgttcagtaaaatagctattacttcatcccactatgtgcctactaccatattataggtttagtgtatagatatataaaatttatatttatgttaacaaatatttgcgtacccattgtgtttcaatgatctccagaaacaggatacaccacatgagatacacagatgaattaaagcttactaagagaccacaacatgggaagctaaatgtagaaaatatccataacatgaattagaatttgctaaatacagaataacaaatgagtcagcatagcagagtgctgatgatcgtggtatttaaagtcaggcaacactggttctcaatccctgcttcatcatttacttaattgggtactttaaatctcagtcacatcatcaactattaaatgcatgaggtttaagtgagaaaatgtgtaaaacatatggcactggcctgaaatatattaagaactcaaaaggtatctgttgtcattagttccatataatagatattggccatcaaaaaaaatttttaagaaagaggatatggaggagagagggcaaggaagggaggaaaaggggaaaaggtgagaaagaggaagaaagagagatcacgtcctcacatttggttaggaaagaagaaggaaggattaaggaaatcttcatgaagtagtggcattcgagatgtctttgaaggatgcttgggattttgcaaagtggagttaggaatgaaaggtatcttagacagaggatttaacctaatgttagatctcagatgggtcagttgaaaagtgtgtcctccagtgtagctgaagtgcatggtgtttgaaactgagaaataagatagaaaaagacatgtttgcagaaagccttaaatgccagcgtggtaagcctgtgcctaattcaacagatttttgaataaggtagtgagaaatttagtctgtgtcttacatcctagattaaggtggcagcattgcccagggtagagtgggaaaggaagaatgtgaggatgaaacttatcaagtagtctcttacaattgcattaaaattaatgagaaattcattaataatgtttaaagatggcagtaaacatggaaaggattcaaaagatattgcacatctggaacccagacttggcaacagataggagatattggagcaagttatgtagtgacatataactatgaaattccaagactccgtgattggaaaaatcgtaatgctattcacaaaactaaagaaatacaaaggaagacccagttcgtgttgttgatgataagttcagtgagtagagaatctgaagtaccaatctctaatgacagtgctcattatgcagctgataaatgtagatcttgagtttatgggagcatttcaaaatggaaatattgatttggatgtcaagtgcccacctacaaacagactgcagtgtagttgaaattataacttcaatgcattataaagaaaatagggaagacaatattggaagttttctagcatcttatcacttgaaagatacacaaaggaactgtataaaaatgtaaactttgtctcagtttgaaattccatgataatgagtatattataatttagagatcaaatagaaaaaaaagtaaagaagagtaagcaagattataaaaatagcagaaaatgcaataccaaagagaatatggaaagatgattttaactaagagtcaaacctccttgaacatggaccttgaattcaaacaagattctcatgttaatagttaaaaacaaaagcaaaaatcttgacagcatgctaatttgacattgctacattcttttgttttgttttatgaagcaaaatgtttcttattgttgatgaaacatagtctgtgcttcacatattaggcacactcccaattagtatgaagaacaaagcaatgtgtaatcacatgaaagatcttcaatggtgaatgaagaaaattctagttctttaaagtaaaagagcatctgacttaattattggatcaacctaagcgattaacataaattagaatttttaaataatgttgcatactcttcaagacatgacaggtgagtattctatcacagcactttttaaattaaaatctaaaatcctcatgcagtgaaataaatgcataacattcacactcgtattcccttcattatgagcaatctaaacttttctagcatagtgtattaccctttgtcactttgtattacttttggtccttcaaggtccaaaaatgagaaaaagttagccataacaactcacacgggtgtcatttattctttctgtccacagaaatgctgttttaaattatccagtcaaaaacctattgaatgcagttaattaggtctcgtatttctaagccaggcatgcatattgcccatctttcagaagacaaacatctaagctataattatcataaaaagcttatctatgagaattatactatccagtctcccaagttaatataatgcaacattgtataaaaacaggaaaatgctgagtgatattaattattacatgaaaatgttttaaaatgagcttgctaagtaattcagtggctatttttaggatgtaataggaaaagcactgcagtaccttggaacatttggtgaattgagcaacgtagagcaagttgtggctatgattgatgaagaaatgtgtatcaactgtggtaaatgctacatgacctgtaatgattctggctaccaggtaagaatcctgctggaattagaatgctatgagacatgtttcttcttgtttttacggcagaaagcattttctgttgctatgtgtgaaatttaaaccagtggtgccaaatattgctcttctgcaacagtacatctttctgtcctgtcacccttataatatggtctttttttaaaaggaaacttgtaacttttactaactatgccagcatttaatgcacagaattatttttataccatttcatcagccacaacattagagagaaaaatccaactgaaaagagaaatgcacacaaaattaggaatactaggaaagcattatgctttaatacagaggaaagggaacagaactaccatttatggccattactctgaaaggctatgattccttctgccaaaagagagttctcttccattcagtattgattaggcttttactacagtcagaaagaagcactttcccaccaacgagttgtataggttggtcccaggaattcctctgaagctggaaaagcctaagagatgtattcttccctcatgaagtgagccatagctactttccagctcctcagtcctcagcagagcatctaccatgcaggaaaaaaaaaaaaaaaaagaaaagaaaagaaaagaaaaagaaaaagaaagaaaaattggggatttgactccttctagtgggctattctcttgaaaacacattctgtgaatttctctttggcttataatttgcttcttcatttacttcctatatatttataacctgctattttttaaagagtttggcacaactatgacttttaactggttgaattttagaaatgaatgaaaaaatgatcataacaatacttttaaacataagtttcttctcaaaagcctgatttattgtgaaagttaaagaatttcttaagaagtagagtttggagaaagcaaattttaaagttttggaaaactactaaactattaaaaattgctaaaaactatacaatattgtttttattatatttttcaagctataagtaaaaaaagatctttttaagaaatgatcaatggaatgttctaaattcataataaaatgtccccatgtttaaaaagagaagtttgtgtaccttattcaacctaggggcagattccatactgctcatggtgggattttgcatattcttatgacagacatattttaatttaaaaaaaaactattaatttttcttcctagttccacagttctacaccaaatttttactcaattcatcaccttttttctagctaaaagctgtcttaaccgttatttttataaagtgctagccatatcacatttactttcatgtcgtctttcaaattaaccaatcagagatcaatcaggaagtcctataactatcagagcatcagctctctaatatcttaaatcttagaacttatggctcccaccgtggaattctagacttggaacaactttagaaaaatcttcttagtaatgagaaagaaaatcacaagtatgcattttaaaagacttagaaagttctttgattcttctgtctcagaagataaaaatagaaagccaaaatttttaattgaacataaagttttatatctttgcagattttcaaagtatatttctaagcattagtcttaatttttatcagttacttcattgagtttccatttatataaaagggtacctaaggaagataaatcgtttttactcatccaaacagcaccttaaaatgttgttttacaaaacatagcaccaatttgtgtggacagatattctcatgacttgctatagctatagttcttgttcaaatatatgtttatttccttacagatcagactttttaaaaatattaagcaactatcatgatttactctgaaaatattattttcatttatatgtgcataaaagagaaaaaatatagttgcatgcagcttcatttggaggggggaattttttaaacaactatatatatatatacacacatatataattgaattataacattggtatgagacaggaaaaaaatcaaaataatgcaattccttgaaaatgtaagatttgtagacctggcctcaaggggtaccatgggggtggagagacacttattgtcccttgtaatttcctcagccccgacttagtcacttcaaagtagtacacagtctgagtaaaactcttgtattttttttgcaagtgagactgccaggcaagtttcctaaatcccctctgacaccatgatccacccctacgtagctgccctgaaatccctcctagatagaaatcctgtaacttccgctgaggtcttacatgtcatttttcatcattgaaatgtttctctttaatgggaaaataatcatcatatctttttttaaaaaaaactcggtcctgaatttcatactaggtattcttaattgcttattctacattgcttcatggaaagaaaaagagaggaagggagggaggaagggagggagggaatagaggaagacgggggaaggaaaattgtaaaatttctcaaaatcctaagccgtttcagagctggaggcctggctgtggtaatctgggctcaatagtgtcagggccaggactggacatcagttttcctggctctccattcagtgtttttccccttcgtggtggacaatgactagagtcagcttggaaatcttcaaaactcaaagctgactgttaagctaatttttttcttctgctttcttctaaaaactacatgcattatttgaaatccaaacaaatgtattcattgcctcagaatctgacagtaacacttttccactgtcaagaacaaagagtgtgaagaggaaaaggaggacgtgtgaaagtcccccaaaatccacaggtagaagacgccccatcctggtagaactggaaagacccgaactctgctcagaacaaagaaaactagagagtgactatgttatgacatattttcctcacacaatgaagaaaaatacccctaaggaattttaaacattgtgtttttaatttaaaaggatttcttttctcgctctttttttcctcctctgtcagctcaactgttgctatagttgcaccatagagctggacgtagttgtctcatagtgtggctcctctgcagcagagaaaaatgttaacgctaaaatggggacattgttgacctttgtggtcagtgacatcaataccctctatttctgtttgcaggctatacagtttgatccagaaacccacctgcccaccataaccgacacttgtacaggctgtactctgtgtctcagtgtttgccctattgtcgactgcatcaaaatggtttccaggacaacaccttatgaaccaaagagaggcgtacccttatctgtgaatccggtgtgttaaggtgatttgtgaaacagttgctgtgaactttcatgtcacctacatatgctgatcttttaaaatcatgatccttgtgttcagctctttccaaattaaaacaaatatacattttctaaataaaaatatgtaatttcaaaatacatttgtaagtgtaaaaaatgtctcatgtcaatgaccattcaattagtggtcataaaatagaataattcttttctgaggatagtagttaaataactgtgtggcagttaattggatgttcactgccagttgtcttatgtgaaaaattaacttttttgtggcaattagtgtgacagtttccaaattgccctatgctgtgctccatatttgatttctaattgtaagtgaaattaagcattttgaaacaaagtactctttaacatacaagaaaatgtatccaaggaaacattttatcattaaaaattacctttaattttaatgctgtttctaagaaaatgtagttagctccataaagtacaaatgaagaaagtcaaaaaattatttgctatggcaggataagaaagcctaaaattgagtttgtagaactttattaagtaaaatccccttcgctgaaattgcttatttttggtgttggatagaggatagggagaatatttactaactaaataccattcactactcatgcgtgagatgggtgtacaaactcatcctcttttaatggcatttctctttaaactatgttcctaacaaaatgagatgataggatagatcctggttaccactcttttgctgtgcacatacgggctctgactggttttaatagtcaccttcatgattatagcaactaatgtttgaacaaagctcaaagtatgcaatgcttcattattcaagaatgaaaaatataatgttgataatatatattaagtgtgccaaatcagtttgactactctctgttttagtgtttatgtttaaaagaaatatattttttgttattattagataatatttttgtatttctctattttcataatcagtaaatagtgtcatataaactcatttatctcctcttcatggcatcttcaatatgaatctataagtagtaaatcagaaagtaacaatctatggcttatttctatgacaaattcaagagctagaaaaataaaatgtttcattatgcacttttagaaatgcatatttgccacaaaacctgtattactgaataatatcaaataaaatatcataaagcattttaaa

SEQ ID NO: 186 - DNA, 158953 bp, Homo sapiens
gcgaggaggaaacggtgccggagcgcgcagggcttgctgccgccaccgccgctgcacaggctgccggagcgagcctgccgcgcgccgccctccccgctctccttcctgggcgagctgcggggatggggcggccgcgggagcccgagcgcgcgcaggaaccgccgccgccgccgcccgcgtctccgttgccgcgcgcctgagccgccgtcgccgccgcgcgccctgcccgggggcggcccccccagccccatggaggtctcccggaggaaggcgccgccgcgccccccgcgccccgcagcgccactgcccctgctcgcctatctgctggcactggcggctcccggccggggcgcggacgagcccgtgtggcggtcggagcaagccatcggagccatcgcggcgagccaggaggacggcgtgtttgtggcgagcggcagctgcctggaccagctggactacagcctggagcacagcctctcgcgcctgtaccgggaccaagcgggcaactgcacagagccggtctcgctggcgccccccgcgcggccccggcccgggagcagcttcagcaagctgctgctgccctaccgcgagggggcggccggcctcggggggctgctgctcaccggctggaccttcgaccggggcgcctgcgaggtgcggcccctgggcaacctgagccgcaactccctgcgcaacggcaccgaggtggtgtcgtgccacccgcagggctcgacggccggcgtggtgtaccgcgcgggccggaacaaccgctggtacctggcggtggccgccacctacgtgctgcctgagccggagacggcgagccgctgcaaccccgcggcatccgaccacgacacggccatcgcgctcaaggacacggaggggcgcagcctggccacgcaggagctggggcgcctcaagctgtgcgagggcgcgggcagcctgcacttcgtggacgcctttctctggaacggcagcatctacttcccctactacccctacaactacacgagcggcgctgccaccggctggcccagcatggcgcgcatcgcgcagagcaccgaggtgctgttccagggccaggcatccctcgactgcggccacggccaccccgacggccgccgcctgctcctctcctccagcctagtggaggccctggacgtctgggcgggagtgttcagcgcggccgctggagagggccaggagcggcgctcccccaccaccacggcgctctgcctcttcagaatgagtgagatccaggcgcgcgccaagagggtcagctgggacttcaagacggccgagagccactgcgtaagtcctgcccccggggcgccgcggagagcgctgctgccggggagccgccgccgccgccgaggcagaacgagctgggggcgagcggcggggcgggggtacagccgggtgacatttaccaggtctcaggttcacaccgcgggcggccgtccgaaggctcctctcggacggtccccgagacctggagcacggcctgaggtccccaaagggagagtgtaaaaaggggggcggggagggttggagttagactcaaaactctagtggctgcatcccattgccatccttccctgtccaaacggggacgcttgtttggggctgagtctcctcgcgcagcccctctttcccattcgcttctccagacttctctgtgccccttccgtgtagtcccagcaggcgtgtgggtctgaccctcttggtcaacagttagcaacacagtgccctcggcagagaagccattgaacctaaagggctccctgccacaccccagcctttgtggccccctgtctccgccccccaccggcaacgcaagtgctgtggtctgaagagttgctagcccgctcagcgtggagaaatgccagcctgcaacagaggcttgcgctggaaccgaacccctggcgtgagccggtgcgagggggcggtgccgtggctctgctcagggtgcgctgtggtcgccagccgccgggagaggctgggcgggaggtggccttgtggtaaaagcctcatcctagaggggagtgcaagggaaagtgttgggggtgctacaggcagtttctgggctccagattgcgagactagatggcgggactcagagtcaccaccctggggctgaaccaggcaagcgatacaggtttcccctgggctcccagggcagccacagcttttatcttgagattggcatttctttgactggaaaataaagaggcagttcaagagggtccagttgatggggattatggagccattgtgcacttctccggaggccgtttcccttccaaggcggctggcacatcaactccacatatggctcctgagaggggagcctgctgggagcctcctttataactggacaaaaatcaaagcgcagaaattaacggctacaggtgttgccattgttttggtacaaaatgaatcagagaggaaggggagaagtcactgcttggaaaatgtgttgatacaggggcacgttggctcccaggtatattaatatgtgtatagaaagacagcttcccccacccccttctttctctgcaaagcacatcttaccaaatattagccctatgagccagggagaaaaaaaccaggaggtcttttgcaaggcttcttagaacggtcacttgctgctgcttctttgcctgtcaagctgtgtgctgggacacacacattaaggccttcattttgttactggtataatttttaaaaatatgtaaaaacacatatttgcctcctaaatgacttgctgttgccgtacacatataatgtaatatttgattcctgtctttattagatctttataatctaacggtttaagtttggtaaaattatcgtttcctacttctctgttgaaagacttgaaagtacccccgaaatattactttgtgtcaagctttagacacacttagtctctggggttaatgacaagccagctcagaggcccacagcaggtaatgagggtgaaagtccaagctttgccatctgacagctgtgtcgatgtgtggagccaaaacatttctcttgactgcgtctctctacctattgggtcctggaagactcagttcccttccaaacccagccagcatcttgaatgcactcaaaatccacgttttggctcaatcaggtgttcctgcttgtgccgggatggggaggggcagtggcagaggaagtcgcggagcttctgcgagagagctgccccttggaaatcaagcaaaggataaacacatgctgccaaaaatctggaactggaaaaataaataattaaaatgggtccctccacagcatttcttgctgctatttatcaagaactcccagtgtgctcagagctgtgtgttctgaaagacagggtctgtaccccctgagcttgtcagccaagttaaataatatactctggttcaaacaatagcatgtcatggctgcacaggtgggagcttggagctttgcatttttttttcatttaagtaaattccttgctgctagtatgcattgaaaagccttaatggaattgaatttcaagaggagtttgaatgaaaaagggtggtagttttgatgaaaaagctgacaattttctaacctattaaataggtagagaagatactcaattcaacaaatatttgtttgatgcctgctagtgtaagcaatgctctgtgctgggtgccactgattttgccactgaaaggacgatagcagattgcaaccttgtgtaatggggtcatgggatcagtgtgcccctggctgtcactcagaagaatgatgtcatttgattgcatttgttctgcattttattttcaggtcttgaatgtgtttttgaaaaggcatgctgaattataggtgcctaaaacaggagcaggacttgaaacactctagagggaacctcaatagattccaacagcaattcctttagagcagacacagtaattttaacagtaatccacaggctgcaaggcacaagcggctggatttgcttgccttctttctccctctcctcctagctggctcttattttccgtcttcaatcagccataggtagaaaagtgacaggactgactgggttgtattttcccactttctggttctcttatctcttgtcactgatcctcctctccttcagcttctgctaagcagtgatttacgagatgcttgtgtaatgagtgtgtactcagctgtttacacactggaccattactttttctgccttgccaccaactttgaatccactttcataactgtagcaggttaactgcagctctcaaatgtgctaaggcaaccgatttctgtagaccctctctctaataatcttctgtgatatttgtacagcacttccacatgtattatttcttttgagccccgcatcaagtctgaggttgattctatggggatgatttcattttccagatgaggaggctaaagatccgttaagcagcttgctcaagatagttaagtgccaaagccctccaccttaaatccaggtcttccaatgtctacatctctactcttcccaccaccccagggtttctcgaactttcccttgaaggtcccctaattaaattggcagcaaacaacctcccctaggatgtggggttgaggctagagggtaacctcagaaggcagtacatgcctctaatcttggcttgtgttttagaacttcatgtggtctctttcctttttttcattcttttttataacacacctgtgcttggattagtataaaaatgaatgtttttaattatgcacaagttaatcaatttgacttcctacctttctgaactctcactacccctggcacaccaacgtgatacacagaaagtgtttgtgttcgagtttgtggagtctgattgctccagacttgtttggccaccattgttgggttctggggtcactcgtggtttaaacatggcagccacccctcggtagacattgagggtagtacgttttcctgcagtattggtccacaggactctagatcattctagtttgttctctagttcattctaccctttgtagggggacataccgccttcttccacgcctacataattctaaagcctgacataatttaactgtcatgcagacaaccacagaatgctcacatgctgcccaacagagagcaacccaaggaacatgtgtggagaagtgacatcccagttccacttggcgatgcagcctattgacctcaaaatccgcagtcttcttgtgatgtttatttctcttccagcttctgttatgattttgtcaagccattttgcagtctatagactagatggtgattttaccctcatatacacatattatatgcaaaaatggattcaaaaaggacaattgccatgacagcacccacttagaaagaggggaaagcaatcatagctactatctactgaatagttattatggccaggttttgtgtgaagcaatttacatgccttattttctgttgattctcattcaccatatggggcaaggactgtagttatcatgatgattagagatgagaaaattaaggcccagagagcttctgttaggttccatagctggaaaatagcagaggatttagaacctgggtggtccagctctacgacctgagcttttagccaccttacaagtctatattaaggagccctaccctattactattaataatcatgatggtgatgatagtaaagacatccaaagcacacggcattttctatgggtcaagtagtgcttattctatacacattaactcatgaatccagagaatattgctgtcaaggaaatgggattccccacttataaataaagaaaccaaagcacgaagggttaaataattactacatgcaataatgtgtacatgtccactgccatggacagtctgtcagcatggacattaggtcctgatgtcaaccctaacctgtatggagcaagctaagcccttgcaactgctatgctaagaccagctttttgtggacacaggcataggatagcagagaatccttagttatgagctgagtttctaggtttgcattggtgaccacctgaagttctgactctggcaggattgtagtttcttaactgtgaacttctagacagtgttggtgttctgatctatacatcatctcaaagggtgttctctgttgaaccccccatacctagcatagtacccagtatgtagttgggacttcagaaatatttgttgaatgaataaatgaaggatcgtagagaatcatgttggaaatgttttctctactcagcagcaacactttctgggagtctggtcacctcatactcccttaatcattgtctttttcttaatgcctgatgtgtcagggccccttccttccttagttttaggttacatggtgtcctttactccttcacctcttcccaggtacttccattcattggaataccaggcttctggtgttgccaatctgagagttacttttgaccatggaaacctagcatggttggaacttctatggtgtaatttttgattgcctttcaactatgagaggaaagggctttatgctgtaggcagtggtccttaaagtgtggactgtggcccagcagcatgaatatcacctgggaacttgctagaaatgcacattcttggaccctacaccagacttactaaatcagaagctctggaggttggggtgggactggcaatctgtattttagcaagctctcaacgtgatttgaagtcatgcttaggtttaagaaccactattgtaagataaaacaattttccttgtgttccaactgaggcacctaggataggaacttgtcgcattttttttccccttgcattttacttagggccataaaaagtaaccaacacattttaccacctgatattccttattccctcctcactgatcaaaggcagtacctagaaagccctttaaagacttgccatttttgggcttagagtctgagtctcaaaaacctgtaagccatagtttaattagctccttcactcttgcatataacagtttatttgtatttcactcccagatgtggggggatgtctagagtcgtctattgtgctgtacgccagaaccaattccgcacaccagacattctctccaagggtccattctttacaacatcagtcctgttaccaatttctatcctagtcatgtacagttggttgcatggaataaagatctacttgagtaaggtcagataaagggatgagggatattgtggacagaaacacatggaattacatggtaatctaggaataaaagcaatgctgtgttatggttatgtgcacagtcactggaaccaggtcaattgggaccaaagctaccagttaccagttgtgggactgtagacaaattattcaacctttctgtgcctcagtttcttatctataaatagtgatcctcttggtttcataggattattgtctggattcacgagttaataagtatagaatgaatactactaactacttaactcatagtaaatgttatgtctgtgtttactatcatcaccatcattactactaatagtgttaggacgggctccttgatatgcagttggaaggtggttccacattcaaggcagcttaaaggagctcagtcagcatcagcaaatgatggatgctccttccttagtctccctgttaacatgacttagcctggctgctttgcaccatcctcctaccaaataacctcctctgcttcctcaaacatctactccctcccacctgagtatgcctcaggcctgccttgatccccactgtctatctttttttttttttttcttgaaacagggtctcattctgttgcccaggctagagtgcagtggcacaatctcggctcactgcaactacctcctcctggattcaagcgattctcctgcctcagcctcctgagtagctgggaccacaggcgggtgctatcacgcccagctaattggaataaaatcatttcttaaacaatatggttcctggaggagagacactggaaactttctttcttttttttttttttttttaaacagagtctcaccctgtcacctagactggagtgcagtggcatgatcatagcttattgcggcctcaaactcttgggttcaagtgatcctcccacctcagcttcccaagtagctgggactacaggcacacaccaccatgccaggctgattttttttatttttatttttggtaaagatgaggtcttgctatgttgcccatgctggtctcaatctcctgagctaaagcagtccttccgaagtgctaagattataggcataagccagcacacttgcctcccactgtacatcttaacagcctgtcaccttcggctttggctactaactggcaatgactttctgtattatttagtccaagttgccaggagagagatagagttgagtccagttcatctttcccaccagatgatgagcccgagttcagtgtagggatttgtaacccttggggcaggtgctggcccctggtccgactagaagaggatcaaacatgcaattgtccccagcaggtgctgcaggtggattcccttagaacaggatggcggaagagccacaccaagaccaacatcttgattacagtagcatacagtagtgtcaaatctgcctcccttaaagttttttgatgaccactcccttccccaaacatgcattggcacacagatgatgaagactgggaaaccccaaagtcgacttgggaacagtgtgtggccagcatgggtctaacctgttcatcaaagtggggccatggaatggtaggttttcttattatgttttttatgaaatgtgcttatcatttttcttagttttaattttctatcttgatgaaatgctaatttttacatgatcacaaaaacaaatagaactgtgacattcatttttcagtttcagtagctgattttcatgttggttggattgtctgttcaatagctacacatagtgctttccttagagaagttactagggggatgtggccctatttccatcccaccaccctggtcaatgctgttatgcaggggtcagcaaactctttctgtaaagggccagatcatcaatattttcggctttgcaggctgcatacagtctctatcacaactgctcaattctgctgctgtagtgtgaacacagccatggacaatacataaatgagcaggtagggctgtgttccattaaaatgttatggacaccgaaatgtgaattccctgtaattttcacttgtcatgagttattctttttttgattcttttcaaccattttaaaatgcaaaagctattcttagctcatgggccgtttgaaaaacaggcaacaagccagatttggcccacaggtggtggtttgttgactcctgctattatagaaagaatgagagtaaaacaaacctttcccatacagtctgatgctcatggcaagagagacgtgaccaaaagctgccgtggaagtcccaaaaagaggcactactctcagcctgggaggatctgggaggcttcagagaggtaatgcttgagctgcatcttgaagctgagtggagaaggcagagaagggagttctagagagaaggcacagcttgtgcacaagcaggaagttgagtaagcctgggagccacaagcagctcaccaggctgcggaatgtccagaaacgagtgtgcaggtccagatggtgaagggcttaatgagacgggcaaaggtggttggattttatcctgatggttggtcctctagactttccaaaccttgcctttaaaataaattatcaatcggaagctccctatgagaaaaaggttagaaaattatcattaggcagggagcagatggcgcatgcccataatcccagcaccttgggtggccaagacgggtggatcacttgagcccaggagttttaagactagcctgggcaacgtagcaagaccccatctctacaaaaataaaaataaaaatcttagccaggtgtagtggcacatatttgtagtccaactgcttgggagtctgagacagggagatcgcttgagcccgggagttaaaatccagcctgaacaacgtaacacgaccctgtctcttgagaaaaattatcattgacttggttctttttgtaagaccaattaccaagcgctgggaacatgggaggaagcaggggttgggagtttccggagccctacaacttgccacaccccatccgggcctgtccctgaggcatctccaaggaacttctagagcagggtgtgaaaaccatggctaaggttgatggagtaaaacagcgggattataaacagacacaatctgaatgtgttctagaaagattactcagaagataaagtggctgcaataaggttggaggcaaagcaccttattagaaggactatcatttgttcgaatactttcttgagctcctattatgtgccaagcaatgtgtggagacatttatatcatggtaaatagggtagacaataaacatttggcaaattaatagttacttttacattaagatgatagctaaaatttacagctcacctactgtatatcattattctaagcactttaccaatattaactcatctaatcctcactgcaactttacaaaatgggctgtattattactaccattttaaagatgaagaaacggaggcacttcactaaacaggtaatgtagcagaggcatttgggggttgcaggtgttggggtaagttctctttaaggaggccgaattgacaccaggaagataagaaaggccggttgcaggtttcccttgcagatctgggaagagcagtgctggcagactggagggcatgtgcaagaactcaaagatggaacatcctggtcttggtggttgtggagagcaaaatgctagtgtggttgaggctagggaggtagaggagagagtatgaggggaggaggctggagaaggaagcagcaggcccagcctgcaggcctccttggcaatgggaaggagattagattttcttctccgagcacaggagagcctttgaagggaagtgaaatgattggatttgaattcctaaataacggctgccctgtggggaatggatgagagattggccacagcggaagaaggaaaacctgcaggaggctcttgcagtagtccagacaagaaataatgtcaccttggccacgagcagtggtgacaaatatggagagaaacagatggattttgtttattgcaatcattcaactgagggacgttgaagagctgaactgaggttgcagcaatgaggatggagaggaggggtgaagtgaaataggtttttaagacgtggaggaccaattagaggatgagtttaatttttgttgatttttagatgccttgggacatacaggaagacaggaagagttgctaagtagggagttggcaatgaagttaggagttggggatccactctataaaccttagagtgtgccaggccctgtgtcaggccccacacatccctgtttgggctatatgtgcactgaggggagtagccaggtctggctcatctttctttcccaggcatctatcaggttggctaacacatggtgagtgagccctcagtaagtgtttctagaactggaaaaaaggtactcttcatctggtggagaagatagtgattatagcatggtgagatgagtgcgtccaagaggagttgacactggggctctgttttgaggaaaagtaaaagctgggcagcaacagggaagtgtatttccttttgactcccttcccaattagccaggattccttgtcatcccctgtctccccgcaacctgactgaggaagcgtgttacctaacacaccagctgttcctgatcatcgccccttggtcttctcctgaggctcctttctctatcattgaccccttttaaaaattggattccgagtgcaaagccttgcttctctgaggcaatagaggggggaatagcctagagcagctggtggctgtaggtgtaacctagtgtcagcccccgcacttagcaatatgtttcttcataaccctgcagagctcttgtgctgtagacctctaatgcagcctgtagaccccctgacagaataatgttttttaatgcatgaaatgaaaacattggattgcaaaatagatgtaatatattaatatatcgatctatcaaaatgttttttcaattaaaggtatagtaatgtatcttaacacattcaatagcaagatatagaggcagtaactaccataatttcaaagtagagatgagcataaatgatactttgagatatctgcaacaactatcaaataatatgaaaatatctgatttcttttggtgacaaagtcacaggttcagtaaatactgctgtggcctgaatccatgattaaaggaaatgctaagttccagttagagctccctggaataaagatttttttttttcatccagtttcatggattccctgaattctgttcatgaactgtggatatcagtggagccccactctaaccattcatttcagttaccaagtgtttcagaaaccaatgacatgaaatgcaaagtttagcattttatttcaaaactcatttgactggtttattttgacaatagggagtttgttcccatctgtattttacagatcaagtacttggtcaacagcaagtgctccataaataataggtggatgagtggatgggtgggtggatgagtggatgggtgggtagagaaagctcagaaaggataaatgactgtctaaacacttacagctcataagtaatagagtttgaacttgaaaccacatattttttactctaaatcacttgttctttctattcttccatgctaccatcagctacttttatttgaaaggacacaatgatagggcatgttcttaaaaatatgcatttgaatcatgggaaaggacaatcctattattatttgctttggtcagagcacacctaaagtactgtgtttacttcttagaagcacattttaagtacactgaatctgttgactgttcatggactgagatggcgagagacttagaaattgtctcttacaagctatcaatgagctatggatgtgaaattcagagaaggccagtttacatggtaatgggaggtctggggtggttttctattgctccccaaggcagaaccaaggcccagtatttacaagggacgaatcttggctcaattaaagaactcagtaatgattaggcctacttatcaatgtatcataattgcctgatgagatattgactgaaagtattcaaacattgacccatgtatttatttatccctttgataagcatttattgacaacctactccatgccagatgctgaggtggatgctgcattcgaagtgtagaatacaatactattggagatagtcagtcttataaagatggagtctactgggagacagtaagtttttaaaaacaatagttataataagtattttgaaggaaataaatggagtgctgtgattcagaataaaaactgaggtaggaacgggaagagctatggtcatgtgtccacgagtaggtgacattcaacttgaaacctgacagattgaaaagagccagcctacaagggagtgaaggggggtggggctagaagaagtagcaagtgcaaaggccctgaggcagaaagatggtaatgtgtccagagtctgaaagaaagtgactggacttggggagcagaagcagagtgcaggaggagaagaatggcaaggaatgggtgtgaagacgtcatcagggatcagctcagggagagtctggggaggcatatggattcaattctcagcattgtgatgggaagccattggagaattttagtcaagggagtaacaggacctgtttcatgttttaaaagatcactttggctactggacagagaataaattgaaagttaaaagggagacaccaagagactcttgcactagatcgggaggggaatgaatgggcacttgggctgaatagagcctgtagagatagagaaggtgaatttgagattattgggaaattcgactgagatttttaatgtattggatgtggggagtgacagaaagagaagagttgagggtgattagtggtgctgttgaccatgatgggtagcaggaccagagggaagaaaagtctagataaccatttgtcagcacctctgaaaccatgtcacagatttcagtggttcttaacaggggataatgacatttacttaggggatgttgagaaatgttggggagagactttcacagtagtcaacataatagagggcactgctttgtggacaggagtcaggaatgctagaagtcccgcatcacacaggacagctcccataatgaggagccatcccatgtagaatgccagttgtttcctcctggacaagcactggtggactgagtctctttcaattctgagaacctagggccaggtgcggtggctcacacctgtaatgccagcactttgggaagctaaggtgggcggatcatgaggtcaggagttcaagaccagcctagccaacatagtgaaaccccatctctactaaaaatacaataattagccaggcatggtggcaggcacctgtagctactccggaggctgaggcaggagaatcgcttgaacccgggagtcagaggttgccgtgagccgagatcgtgccactacactccagcctgggcgacacagtgagactctgtctcaaaataataataataaaaaaaagaatctaggaaaatgcagtttcacgctatctgccattcatatacttttgtaaattatttgagtcaggtcgtctttttataagtaattgactgaaattagccatagggaggagaaggaggttgtgggggtggggaagggacataaagcgggaagaaggaaggatgaatcttggagagtgggactttgctggtgggttggcctgggtggctgggaacactggggcccgtcgagggaggggagagggtagaaggaggtgaaatacaagcttcaccaccttgcatgcttcccacggctgtgctgcacaccagtgatgttttctggtctagaggctgcccagctgtgtccctaagcacactttgaacctctccttttggtcatttgagtccccagtgtaaattcttccttcagacgatcagagagctgccataacttagtcagatcccggtcaacactgtatacactagaatggagaaaagcaacccgagccttcctagctaataaaatcactgtccgacttgggcaaatagttgtcctttccatctccttagctgaataaaagtaatctaattattttcaaacacatgatttcatctggacctcacaacaacactgagaggcagggcatgtggtattattaggtccattttacagatacagtcactgaggttcaggagacttaacttgctggaatcaagcagtctataaggcacagagcaggggccagaacttgggtgcagggctccttcaggggtttcctaatggcaagtgggccccttgggaagtaacagaaaatgatgaaactgcttcaaaacaaagggatcccaaagggaacagaatataaaattaactgcccaagaaaggcattttgtcatgtacaagaaattgataggtacccagttggtatttcctcccacctggtaaggtaaaatcaacatacaggaatccttttagcaccttgggggtaaaacacttgactcttgcttggtgctcaacattggaggccccagttttgtgcccattccctcccgatgatgccgcaaaagctggagcatggctgtgagcaccctgcctcgatgagccgggccatctttcacatggtaggggcagggccaagctgtggctcagctctagagggtgcctttcacaccctggaatgcatgactggcaccccctgcagttgtgcagggcacaatgggagagtatttattgtccatgaaaaatcatatgaagcagctgcaaagaagtctaattgttttcctcatgatatgcccatgactccctgcacacacacacacacacacacacacacacacacacacacacacacgtacacacacaaacacacacacacctcaggagctttggtcccagtttgctatatcaggcccaaagctctttctctctttcagcccaaacatcgcttgagccaaggtagctttctcctccaactgagaaaagtttccctcttagagccggcaaacgtgtaggcgtgacgttatgcttagacacggcaggaaggagaagcagagtgacaactctgagggaaccaagaaagcccaaaggggagacaaggtttagagcgaaatcaagatcggattttgtcatgaaaggcagaactggcaaaagcatcattacaaggcattaaccttgttacacacagacgaacaagcagaggctgggattcagaaataaattacacataataaactagacagaataggctgagagcaacattagcgattatgccctaaggggagagaagggcaagatagaaaataggcccgaaaaaaagagagaaagaataatctctggacacagggggctgactgcactgtttcccccttcttctgcctggctccctgggtattaacctcacttttgtgaggacgtttctccggagcctgtctttcttttgttttcatttgctgcaataagcataagaaagccattcaaagggttccttttcccattcacagggacctgtccatttctgtgtgtttccagcacaaaagaatccatttccattcagccagagcagcccctagagttttcatgaggtccaagcctcctctcctgttttcttccaggctcgctgttgtaataggctgcaaaatcctgactgtggccagggtcctccaggctggtgagaggaacaagcatttgtccacgtcctggtccctgcagctggggaagaactgcagtttagtgtccgctccaacaagttgtgattgtcatttcttaaacagtgacttccttttggttccaagtagcagaaaacgcaaccaacagtggcttaaaccatgacaactattgttaacttagtaaaatgtttaaaagttgaaggtctgcggctcagtggtgtctccaggaacatagaatctcttttctttcccctgcaccaatcttagcatgttgctttgtatccttcatcttgaatctcatggaaacagaacggttgccacgagtctatgcatgatgagatcacacaactgtattccagaggaggaagtgagggaagagggcaaacgggttctcctcaagaggcttctgttatcaatgaggaaacttattcccagaaatccttccagtggacttctcacatctccctgcccaggactgggccacatgaccaccctcagctctaagggttaggaaagccagtgtctggcaatagggaatggagctgccatttggcttggcccaacgatagcttccaccaggcttgggttcattgctgtctgaacaaaattagggttcttcttggcaaagagaaaataactgccatgggtgtggcagtaacttgtgtttttaaatgaagtaatgatagcaagcatgggttatgtgttgctatgtgccaaacctgttctaagctttactgaggcttacgcacaaactcacccagtcctcataaaaagtctgtggcataaaaagtctgtgctcttatcatcatttccatcatatggaggagaaaactgagtcacagagagattaaatcacatttacaaaattacttagctagaaagtgacagagccaggagtcaaacttaggtggtctggctggctctctatgctatactgccttcattaggtaagatgataaaatacttcaggtagcacacagtaagtattagtacatgttagctggtattattattattattattattattattattattattattattactatcatcatctcttttttgtaaccaccctgccaatcagacacatcagccttattagatactagaaagctaacccctaacagcattaaattaattgcccaggtcacacagtgagtgagaaccaagctcaaatgtaaacgagtgctgggtgttctctcaagtttgagaatgttgatttaatggctgcaccacttacccatgctacttttttttttttaaggtaaggtctcactttgttgtccaggctggagtgcagtggctcaatcatagctcactgtaacctggaactcctggactcaagtgatccacctgtctcagcctcctaaataggtgggacaacaggtgtgtgccacacatctggctgattttttatctctgtagagatgggggtcttgctatgttgcccaggctggtctccaactcttggcctcaagcgatcctctcgcctcagttacctatactactgatcccggacttactttgaaaaaaaaactacaattgttgaggacagccagaaatcagagaaggacaccgggaaaggtgagatggtaatttgggacggatttttccttgttccgttttagcttttgagctgcctctgttttcttggatccagtcttttgcaaacaggatctctcatcccacctcaggaaaggctacccatggttcttggtgaattagaacaggtacagtattaagcacctactgtataccagacctggctgtacactgtcccacctggtccttgtggataatctacagtccacatccattactttttctgtgttgtgagatgaagggaatggagtcctctagccagagatagtggtattagaacattctggatacccaggcagagacgatgccctattctccgcgttagcctctctgcagtgttcaaatatttaataaaaataacaggcatggtcagctgatcttacgtttgaacaattctggatttattttaaagcaagatgtgtggcatggttttacttatttttttaatcctaaaggtcatccgacttttctttttctgctcatagtcatgaggcttccttatctaaacagtgatctattgttccaaccttagacccacagagaatttttttccttaacttcaattttcacaggacagctcctcatcttcccatattgcatgaaaagtatctttcaacaagggaaaaagaaactctaatgagctttccctaaatcttcttaaaccgagttcactatagaatattttatgcaaaaacattgccttctcttaggttatgacatcttttccttgaaaagtgatcagggcattggacaaatcctggctagcttatcttgtccttgcagcgcaacctcaacaaagaaatatagatggcactttaaaggcttcagaaatcaatttagtcccataatccatttagtttagatgttaatgaaacttggtgggtttaaaaataatgaatatttaataagacataaattgaaagacataaacactgttggcgataatataatgaagttaataagtcttagcctccccctccccaaatagggcgattttaggagttgctgtgttgcttactgaagtttgctggctgcaacttcaatgtgcctttaaaaaccttagtacagttgggaactgagctctggcagataaagtgtgctatcacactgtgttcagtagctgcagacggcaacggctcttcctagctccatatcttccagagatttgtgtaacaaactcagtttcctgtcgttgaaggcaggatgcagcacgaagcacttcattccttttaaacaaaaaagaaaaagacattttggtcgacactctctctgctctgggtttaaagaggggctttatttaatgatcaggaccaagcgtgtgattacatgtgctcagagcctcagacaatttaaatgccttcaggttgggagttagactttttgttttcccctttaaaagcatcagcaccagggccagcccttcaacttggttcctccttagctctgtggctcgatcctacccatcgtccacaactgtatctttaccttttcaccccctcaactagctaccctgtctttaggcttcctgtggtcccttttggtaaatctagaatccctcctttctgccatcacacccaacaggatcgtccgtgtcacatcttgggaaatgtttgtgtttaacctcacagaagccaacgcctagctaaaatgaattggcggcaggattttgaaaacagccaagtataagatagtctgcctcccaattcagcggtgggctgtctcttggcactaaagtggaattcagcttcttatatcagctgaggggtgttagatagatggccagctcgctttggcactcaatacctgttcatacatagtaaacaggggttttctttggttgggcaggtatggtgattttgcaaggtaatgaaaggttgctcccggggaatctagtctaagagaatatatgtggggcccagaagtgagatcctgcctaggagggcatgagtgacatttcatcagtataatgagaactattgttgttaaaaattattattatttttttgtgcgtttgtgtgcatgttcagaaagaaggggatcaacctgaaagagtccaaccaatcgcatcatctaccttgatccattccgacctgacatccgtttatggcaccgtggtaatgaacaggactgttttattcttggggactggagatggccagttacttaaggttggttttctgtgccttcttcaaatgtctattttaatggtgatattttgtactttaaaaaaacatttttttaatgcttctgggttatacatgagaccaaaccaagaacttcatgaactccttaaagacccccagaaatggcctggaagaaaatctggaattctgtatgtaagaatgccccgtagccatgtaatgaagtatcagctaccttgctgcccaggagtgcaccaagatgtttttccttccttactcataagccagctgggtgaggtaaatggaggtctggtccctaccccaaccctgactcaccttcccaagacatgtaaccttttagttctagctcctttatcatggaaatgtacaaagcacctgatttctcacaacttgaaagagatgagagattatagggcttgaaaagaagaaaaaacaggtgttctttccctccagcccacttaccacccacagagggggtttgttttttgccctttgtacccacacacaccacagagaggttagagatctaaaatcctttgagactcctcttgacttttatctcagaggactatttcttctccactgtgtggacacaccccggtcaagtgcaggtttttattcacttaggagaggggaagaggggaggaggagaaaataaaatcagagataccaaatgacttgtctgaagttatctagcgttcatcttatcaatgtcatcagcaagcatttattgaagaccttctgtggtctccaacaacattcctggtcaggaactgcaccatttctatgactaaagactgagattccttggcttctctgcagccatccatttactctcagctcagatttttaatcgagtaatggtagatctgtttccctcaactgatctcccacagataactcgctgtgtgactttaggtgaattgcttaacctctctgagccttcatttccttaccagtaaaatacagttctactagacaacccagaaaaacgctttcctcttctgaaagtctctaattctgtcttctgcacacgtattccccaccatccccatccccaagccaaacctatttacttgctcctgtttgatcctgtttccaaatatgatcctgtttccacacttgctcacactgtacctccagcctgaaatgcttttttcttttttctcttatttacggcaccttatgtgtctatgctgtggctcagctcaaaccccacctcctctttgatgacatctaggcctggagtgaccttgctctcctctcatttcctgaaatactcatgatctatgtcattcttgtggctcattccaaatgtcttgcctggagacctcaccttttcactggtgtctgtcttgccttcccaacttgattttaagcctcatgagaagggggccatgaattcccacagcctaatacagtgctgagtgcctggtaggcatttgatttaatctgttttctttggaggaaacccagtaacatatgggagggagtttgtttgtatacacattcttttaaaatatacattgatcatctttcctgttgtgttagctttatttcctggggaagggtaaatacccatccatcattctacacaagtcactgggtgacgtctgtagctccaccaacctggtcaggcttattggacccatttgcctggcgggagtttccatcaagcctttctgggcctcctcaccaattatctcttcagatttgggatgtttttgatgagtgttttgacaagaacactgtttccccaaagccgagccaaccaaaccgctacatggtgaattggaggtgaaggaacactcgtctataaatagttccccatgggatggcctggttttgcctgtcctgtgtgttcacccagcagcctgcatgccgctggccagcttttagcgatgttgtggcaaccagggagtggaccaagctgcagcttcatgctgctgaggaggccgcagccgaccgaagtctcgctctcctcaggatctgtatggggtacccattcagaagccacctgtgtggcctcgttgtttttttcaaggtttgaataacaaaggcagctttttgttgtttgttttgtgactgctaacatttacacagtgcttcctagatgccaagggactctatatcttctaccgaattcagtcctctccatgacacaatggggcaggcctactattcccattttacagatgagggaatcgaggcccagagaaatgggatgattgttgttcaaggtcacacaggggcagagcagggatttgaacctggaatgacttcagagactgcactaagatcccctatgctgcactgactttgcaacctctgccgcacacattggtactactctctgaggattccgggggcacatgggagacatgcagatagggttccatgccgtggctggggacacatgctcctggggtgagtcagccttcctagaggctcaggaaagagtcccagcttgagaataaggcggaccatctgactgaggaaatacctcactggcgtggtaacttcttgggaattaacacccaccccccaagcccccaataagagagaagttctctcactcaggagaagggtgtgagggatgaacttgagctgacttgccccaccaggctccctagggcagctcagtaatgcccaagcctctcccctgtatcctgtgtacagattcttggatgtagcccctgaatttacccagaatcctgaagacccaggatcgtgtggatgatttggaaactaccgataatcctcaaatccctttattcagaagctttcagcttctcccttgccaaggcttgtcaccagaactgttagaaaggatgaacactgatagacacaagcttggctccttaagccacagcgtgggggaactaatgagcggcaaaaaacaaaactcaacccaacgcagacagtaggaggaggagaagaaagagggcttggatcagccacagcctgactcatcagtttctgagtgatcatgagttgacggcattttgacatgtgccaggcactgttgtgtataccttgttgaatgagagtcaggaaacagcaattggggcccaactgctgttttttaccaccaccagtaaaaacctgacttcttaaatctctgcaaatcctgtgagttttaatataatttggtgcaattttaagcctcatgttatttaaataatttttccttattgtaaaggtaatatatgctcatgtaaaaagttgcagagtcgtcgggggtgagaggacaacaaagaaaaaattacccctaatcatgtcatgcagaagcaactgctgtcagcattttggattctctatttatgtagttgaggtcaggttttgcatccttttcttcagttagtgagggaaaatgcttacattaaaatgttattgcaaaccctttgtaaaaagtatttttaaataactatatcatattctattatttgggtacattattttgaacttaagctaagatactggatcacttttaaagtatctttaaagacatgcattttccaaggaagacggcattacctccaaaggtaagatttcactgataatctgtgaagaaactaaaggctacagtatgccagtacctttactgtcctccttctcttgcctatagacctaagtccctttataagattttggggaaatagaaggaatttagagctcaaagggtcctttgagagcatctaatctgctcttttattttatcggtgtaccgtcccatggtcgtgaggtgagttatgtctagtcacccccgcagttatttccccatcctgcttcttttcggaacatgattgcatgccgggtttttttcagtcgtcagcatctccactgagatcagctgaaaagtatggtcacactgaactcagctttggggaattcacactgcacgtgttgcacaatgtatgcatttctgtaaacacacaccgagtctttctccagattatagtacagcctatcatgtggtttggattcctttgagctgactctgttgcccatagaaaattgtccttatttcaaaggcagaattgcatattttgagcttttccaggtggtaaagtaagtaataacagaatatgcatgaaatttgaaatttgtaactttatgcatgcccattaaccttcgtgtaagcataaaagataagaaggcaatgggcaaggaagaataatcgctaacatttctgagctcttcctgtgtgctgggcattagaaccagcatctgcacgggttaactggtttaatccttaccagtcaatactctcaccatccccactttataaatgaaaaaacctgaggcctcgagaggttaggtatctttttcaaggtgctctgaaccaaaataatctgtcccagagcccgagcttctatcccccaactaaactgcattaactcttacagagcttagtagagtttgagagctggtttttgttatatttctttctaatactggggtataagggttgataccaagatgcagatgtttgaggtttcataagaaggggccgagaaccctgtggtttagtttgttcctatttggggatggcttcctggcaacccagctgagtgcagagcccgctcctctctgagctgcgcgtagtccacgggggtctctgaatctcctttggggccccagctttaccccagtgggctcctttgtaggaaaggtaggaattctgtattcaagttgctgttttgaatggtgtcagcagtaaagactagtgtctccccgacctcccagggactgcagtagggttcaggatacaggaagctatatcacatagctctatcctgtccccatatccagtcttgaggtatttcctatgtgcttgggctcagactggttacctatgtggccctctactcccacttaatggctttcttttgtttatttttttttcttttttgagccaaggtctggctctgttgcccaggctggagtgcagtggtgcagtctcggctcactacaacctctgtctcccaggcttaagcgatcctcccacctcagcctcttgagtagctgggactacagacctgtgcccccacacctggctaatttttttgtatggacagggttttgccatgttgcccaggctggtctcaaactcctaggctcaagagatcctcccacctcggccttccaaagagctgggattacaggcatgagccactgcacacggcgccactcagggatttcgtttattcaaatcacagcaaaattaaaccggttccaaaaagttctgtctgaattcaaacagaagcaaaaactctgtactgcctaaagagtctgccttgactctggttattgaagtttttgaatgaatgtcagagaaaaaaatcttttgtaaaggcaagctgtactatatacccagaagatgttcaaataaggaataggagaacttggggaacctagaacaggacctgggaccggaagtggtggtggtggtggggatgactgagctaacagaccaaaaagttaaaacaggaggaagtgtcaaaacttggaagtgggttcattggttggctgtttaggatgtcatgtgaagcctgcttcaagttctccccacctcattaattgcaatttatgagtttgcagggactccccagtttgaaacttttagtcccatataatccacaaatctagaacctgtggttcagactgtatgcttctcttactacctacactgcaataagtagattggaaacaaaagagaaatttgccttgatctttatatttcatctttgttactcctaactactgaggcacattaaatacttaccttgctttctcctgtgtgtgcatgtgtgtgtgtgtgcacgcatgcacaggcatgcacgtgtgtgtatatgtatgcaggcatgcacgtgcatatgtgtgtgtgagcttgtgtgtgtgtatgtgtggtttaagtctccttcccagcatttctcagaaactgcttatggaaaaaaataataataaatgaaagggttggcttgtttgcccttcaactggttagccccacagagtgaggcataggaaattaaatttggcataaaatattatagctttttgaacacccgtggcttttccatctcatggtaatcgtaaagaaaaaaaaatagttttttgtttaatttttctcccccctcattttcctcaccatgatatccttcctgtgggtgatcttgaacctgtcttacaattgtatggtgttgaaatctccactcagttaatttcagcagtgtagttgggagttttatatgcaacaaaaatcccaaggctcgttaatagtctaccatgaggcttcaggaagacatcaacagaaacaatatgttgacacgaactgaaattctccatcagagaaaatttgttttctacacaggcttcagctggaaaaagctgaagagccctataaaatcttgaatgctaatagcgtcgtttttcatttaataaatatctactgggcaccttgtatgtgccaggcactgttctgggtgctgaatatacaaaggtgaacaaaacagacaatgcccttgctctgctggtgggaagaaaaagacagaaaacaagtaaatggattaatcagcgataaagacacttcagatagtgctatgaagaaaatacagtgatgggtagagagtgacagaggtgttcagcggagaagtgatcagggaaggcttctcagaggaggtgatgttggagacttgaaagataaaggagtatacaagcatacacatggagaaggttcagattgacttcagattagatctatattaaggtcgtatcctggaagataaaaatccacatcgtgcccaaggattgtgtgtgtgaattggatgagatttctcttatgcaaaattcaacccgttttgggtttttgtgactcattgttacttcctgcattgcttcactgatcatgttctttttccgaggctgcccacctaaactgagctgaggaaggaacgtttcccttgctccagtcttgctggcttttgtctgtgtgttgatattctcctgaagtttgcaattagaaagtccaagtgttccattagtgcctgtgggctggggctcgggctaggtgagagatgatatgaacactgacctgtcctttagtcatctgagagagatgagactccaggggccacggaagcagaaatccctcacccctctgtgtagcacatttgggacctttgtggtgaaaactaaaacttcctcttgtcctgtcctcaggattatggagagcattgtttgcataatctagcaaaaagaaaaacaatttgactcactcaccctcaaggatttttaaatttaaatgttatatatttatttttaaggtaatacaatgatattgtttaaaactcaaaagaaccaagaaaatattccgtgaaaggcacctggtcttgacttccaaggcaaccaatgatagtagtttcatgggtatctttccagagatagtttatatctgtctacaggcaaaagagtgaagatattcttcctcccttttgttgaaacataaaacacagtaaacatatatgttatatatgtaaaaatacctgtatatgtaaatatgtctatatttatagatatatgtacatatttcatataactttaaatataacacaaagagctttctaattatttttatagctaaatagtatttccttgtttgtactatagtttacttaaccagttccctattgctggagatttaagttgttttaatcttttctttataacatacaatgctacaatgaatatatgtcatttcatatatatgtgtgtgtgtgtgtgtgtgtgtgtatatatatatgtgtatatatatatgtgtgtgtgtatatatgtgtgtgtgtgtatatatatgtgtgtgtgtgtatatatatatgtatatatatatatacgtatatatatgtatatatatatacgtatatatatatgtgtgtgtatatatatacatatatatatatatatatatatgtatatatatatgaggggctgcagggtccaagggtatgtcctttgtaattttgatagatgatgccaaattaccttctagagaggtctggcttccaccactgaggaaacatactaatttaaacccagcatctatggctatcaggacaagcttcagtgcaagccacgctaagtagctttttcaggaaactgattggtaaatcctgggccacagaactttttgataacttgtaaaaaaagaaagaaagaaaaacaaagaaagaaagagagagagagggagaaagaaagaaagagagagaaagaaaaagaaagagagagaggtaaggaaggaaaggaaaggagaaaggaagggagaggagaggagaggagaaaggaaaggaaaagcttccttgccacaattcagagttctagagagaatattgatgcttcatttccaaggtaccaagtaaataaatcaatgttgcacccaactagatcttgctgaccatctgtatcaatgatgctccaagagtaaataaaataagcccccaataaaaactgcagtgcagctcctaatttacgtaaaatggatgagtggtggtgtaaagtatgtttttactttgttattttaaagcaaaccccacagacatgatgtcgtttcacctcaacatatttcgttatgcatctctcaaaacctacagttgttttcttaaataatagtaaccataatgccatgatcacagctaataaaattatcagtcattctttaggatcacttactatccagtctgtgtaactaagtattcccaattgattcaaaaaggtattttaaatggttttgttcaaattggtatctgcacaaagtcctcaaaccaaatttggttgttctattatctagagcagtctcctcccttacttttattccctgccactgacttaactgaaaaaaccaggtattttgccctatagaatgtctcttatcatgtgtttggctttttgcttccttgtggtgtcatttagcttgttcctctactcctgcttcctagtgctaaatggaagttagtgctaaagacttgactagattcagtttcaactttattggcaagaatacattatgggtggtgctgcccaatgatgcttttgccatgatgaattcctgaagagataccagggcagcagcttctcttctcttgacccttccttgataatatttctatcagtgtttgtttaaaaaaaacaaaaactggcttcctgtttctctttccctatacaactgctttccagaaccagatcaactgaatctgagctgattaatacagctaatgaattagagacggcaaatcctggcaagcccataccttggtcagtgcctgtcccttggctccacttacaggattctgtagagcagtgttggccaagagaactttctgtagtgatagaaatgttctacatctgtactctccagtatggtagccagtcaccttaggtagctagtgaacacttgaaatgttgctagtgtttttaattaaatgtaaatttttaattaaatttaaatagccattatgtggctagcggctgtcatatttgatagtgcagctataaagtcgttttaaaatgacttgagacacacacctttcccacctcccttaggacctaactgcttctgttttaaaaagagcttttaagaagtcatatttcatatgtttggttagtgagattgacttttacaaagctgctgctgaatttgatgagcagtccaagggcttcaagtgagccactatttgcaccaaatccacctgggcttggcccaagcagatgatggaaggaagtcactgatcgcagggcaaagctagactcgggcccaggtcctggaaaggagaagtgaatgcgggaagttgctctgtgcaaaattgataagaagcctttggctaaacagcaaatccctaactgccatcaggatatgtgggaacaggcatattattgattagtagatgtgtgaagtagactttgtccaaaaagaatctcaggtgccaaatttttcttttgaaaccatgcgcccaatgtggctgatgtctacagtggtagagatatgaatacagataatctatctggatgtgttcaaactgacaaaatgttgaacaccttcacttttcaaagtagtgggtacaaattgtgttaggtacaaagaagattaaaggttaggtacaaaggtgattaagacatggtcccaggccaggcacggtggctcacgcctgtaatcccaccactttgggaggcagaggcgagcggatcacctcaggtcaggagttcaagaccagcctggccaacatggtgaaaccccgtctctactaaaaatacaaaaattagctgggtgtggtggcgcatgtctgtagtcccagctattcaggaggctgaggcaagagaatggcttgaacctgggaagcagaggttgcagtgagccaagatcgcaccactgcactccagtctgggcgactgagtaagactccatctcaaaaaaaaaaaaaaaaaaaaatgacatggtccctgcgcaaaaggagcttgcaatctagtaacagattattatctattgactattgattatgtgctaagcatctttcatagttcttatttgatccttacaaaactgtaataaggaaggcactattagccccattttagagatgaggaaattgaggcctagggagattaagttaccagttcaaagtagtgcagctacttaaaggatggaggcaggatgcaaactcaagcttaagccaccattatacttctctagcactataggattcgagtctcccgatggctcttcatacccacacttcaaaccctgccttcttaccatctcctcttgctccttgacccaaagccctgccatggcctcctctctctcatctacagtaaaaggcaggctgtttacacaggcccacaagacccttgattatcattcccctgttatcttactatcttactgttcactcctctacctctctccactgaagccaccctggcctcctcccattttagtttctttgcactgacagggctgcttttaagaacatgtttcattcaagtatgaaaataactcatctcctgcaagtctaaataaatatcaccttttcagtgacacctaccctgaacatatattctcttaacccctgaccccactatattttataatttacttttttcttattaatagtctgctgttactcaccccaccatacacacacaggaatgtaagttctatgaggtcaggagctctcccttccccattttgttcactgccatttttcaaacacccagaacagtgctgggtacataatgggtgttgggtagatgtttgttgactgaagatggatgaagctcaggtgtgtccaatttcaaaaccactgagtactgagtcacacttgcgtatattttatatgtgaacacaaacctacttgtctgtatctgccaagttaatctgggtcacttctaactgtatgatgatcagagtatcctgtgcaaatacatgtgggagctacttcctttaatttccagtctctcttgagacagcactaatgaagctgtcacttgtggcttcctatagggccagacatggtcagaaattgtggtcagccagcttccacatatgaggatactaccccagccctgaagagcggctttttttgtttgttcatttttggtaactttgcctttacaaaagaagaaatattatgcttgttattaccagccttgttgaggactgagatgtgggaggatgattaaggagcatggtaccttaggcagtatttgtagtgagtgaaaaaggatgtagctttatgattaagctacaatttttgccaccctgctattcaaagtgttgaatagaggccggaagtggtggctcacacctgttaccccagcactttgggaggctgaggcgggtggatcacgaggtcaggagatcaaaaccatcctggccaacgtagtgaaaccccatctctactaaaaaaaattagctgggtgtggtgcatctatagtcccagctacttgggaggctgaggcagtggaattgcttgaacctgggaggcggaggttgcagtgagccaagatcatgccaatgcattccagcctggcgacagagcgagattccgtctcaaaaaaaaaaaaaagtattaaatagaaatcatgtttctctttttgaaaaaaaaaaataggttattcttggtgagaatttgacttcaaattgtccagaggttatctatgaaattaaagaagagacacctgttttctacaaactcgttcctgatcctgtgaagaatatctacatttatctaacagctgggaaagaggtaggtagaaatactagttattgcttctgatttatgaataaaaatggtttaattgatgtcattatctagtagcaaagcttttactttgaactacagagtttaagcagtgccccaggctttgaggagacccgcagtggttcacaggcacggaattaaaaaccttactgactgtcagtaagtaagcaagaaatattatctatttagacaattttattattggctatatttccagtgccaagtttttcagaggagggtgtgcttggaaatgggcgcataatcagcaaggtaactgaatttacacatttattgtgtgggcactgaacggttagatgcatttatgaatatacccaatgggactggctttggaatttggggttaatatcaggccacagtctcatacacattcatgaaccaggaaatatatggtactccccctccccctcttcatttatcttgctgttttggcttttcttttgcttctgcttactgaaataaaagtaatatatttttatattttcttcatctttaccaagtgctgtcaccaagggaaggggaaaagaaactaattgttaatgagtctctactatgcattagtcactattctttgcatgatctctgtctaggtgcatagaattgtgtacatatacatacacacaagtgtagaaaacagtgttaatgaaatgtgttactgaccgggcatagtggctcatgcctgtcaccccagcactttgggaggctgaggcaggaggatcacttgaggccaggagtttaaggctgcagtgagccatgatcaaaccactgtaccctagcctgggtgatggagcaagaccctgtctcaaaaaaaaaaaaaaaaaaaaaaaaaaggctgggcatggtggctcacacctataatcctagcactctgggaagccaaggcagggatcacctgagttcagacgttcaagaccagcctgggcaacatgatgaaaccccatctccactaaaaatacaaacaattagctgggcgtggtggtgcatgcctgtaatcccagctacttgggaggctgaagaacaagaatcgcttgaaaccaggaggtggagtttgcagtgagctgacatcacaccactgcaccccagcctgggcaacagagtgagactctgtctcaaaaaagaaaaaaaaaagaaagaagaagaaaaagaaatgtgttattaatttaataaaaataaatgtgttattaatttattttatgtgaagaatctaagacttggagaggttaaataacttgttcaagaatatctgtatctatctatctatctatctatctatctatctatctatctatctatcatctatctatctatctataggttagcctttgcagggctgtgacaaaaactcaaccctgattctaaagcctctgataaatgatattaaatccaaaatttgtgaaaactggacattccctggctcagtggttttgacctatgaccgtttgaacatggaaagtgcaaagaagataattgagacttacataattatataatggatgtaacagatactctcagcccaaccctggttttccattcttttcctttcagtcattctaaggaaaatagcaatgacagcaatctacatgtgctttttgagtcacagataagatgtgcaagcaatttgtagtttctggtattcttataaagacgatactgttctttgcacattgaaaagtcagttatatcaaaatgaccacactgagatggccacatcttcccacagagcttgtaaaccagtccttcaccatatagaatctcctatgccaatttgcttcaccatgcagacactttgtattatgtttcttccctggggatcccatctttgaaagacttttgtctacccaacaaactgcacatattaagtaacagttcccattcccagggtttatttatcaagggcgtctcaaaactgccggtcagagtactgactgtgttcccacatggagctgataaaattccaacccaaagcaaagaaacttgatatcttccttaatccatgcgtgtttttccattcagctgtctgaaatattgcaaatagctcataagcccccattacttccttcatggatagtaatggaaccccagaactcaggaccccaggctgggaaccattatgaaaagccaccagtagttgatgggttcccactttctagaaagcaaaaagttctagcctctgatcattcaaagcctgaagtcctgggaagagtttttgactgggcatcaaagctggttagccctgcattcttcactgaggattactgctagagatcctactgtttgaactctggctgagcaaatataacgcctaaagagacaaagtccaaggaaggctcttggggagataagaacagccaaactaataagctatgggatatccataaaatggtatgatacggggccgctaaaaataatcatatggagatgtaggcattgatatggaatagtcactacggtctgttattaaattagagggcaggtctaatgtagtatttttagtgtcctctctctctctctcttttttttttttatggagtcttgctctgtcacccagcctggagtgcagtggcgcaatctcagctcactgcaacctccgcctccacaggttcaagcagttctcctgtctcagcctccctagtagctgggactacagtcacacgctaccatgcccggctaatttttgtatttttttttttttaatagagacggggtttcaccatactggtcaggctggtctcaaactcctgacctcaggtgatccacccacctcagcctcccaaagtgctgggattataggcgtgagccacctcgcctggccctctctcatttttttttgaaacagagtctcactgtcgcccaggctggagtgcagtggtgtgatcttggctcactgcaacctccacctcctgagttcaagagattctcctgcctcagcctcctgactagctgggattacagacgcccaccactatgcccagctaaattttgtatttttagtagagacagagttggccagactggtctccaactccaggcctgaagtgatctgtccacctcagcctcccaaagtgctgggattacaggtgtgagccaccacggccagccagtgtcctccctcttatacagagttatatttgtgtgtttaaatagactgagtaatagttctcagagaatgttctggagacccatattccacagaatgctctgagcaaaagtggtcccagaaccagctgttacttactatacccctcctggaatactgtgaggctcagcatagtcaaaggctccgagaagccctgtgctaaggaaacccgttttgctttttcagtctgaggttttatgtttgctggatcatggagcccttttcttgcataatagcagtaaccaatacttattgaacatttagtacctgtcagacaatagttcataataaccccatgaagtcgtgatccattttacagatgaggaaacaaggttagagagattgcatgacacttattaaaatccatcagtgttacagaggcatttgtgaactacaaggaaatacctctattctggttaattccggctcaggatcacgggctgccagctgcatctgtcagcagtgttggggactatgaaatggaagggcgtggttatcctccatgaagtcaacttggaactgaaggatccagctcaggatagtccttgttttcctcacaaaatagagaaaaatagagaggtcccttctagaactccttatttctctaacctgctaaagaagttatttatactatctagcatgtacaacttcctggcataatgagttccacaagttcccttactacctgctgtgtggttttgcctgcagaaagtgctctgtgtgatgctcagttactccctgcctctcaccgccctacttgcaggctctgactggctgcctagatgtctgggtctgcccagctggggtgccctctttgtgggctgctgtttcctgacaatggcaagaggcagctctagggatggggaaatgatttgactactccccctgtttcttttattttcaactccactggaggggtgtgagcaaaacaagccaggagctgaggtgacggcgctgcccctggcaggggtgtgggagggcctcgtccctggtcctcctcgtttccacattgagtgccaaactcctgctgacactcctggggcagagcctttgttattccctaatactcatttccaaaatgccattggccacatatggactgtctctgtatgaaaaccaggcaacctgattccatgatccgtatggaaatcatcattagcagatcggaaacccaactgggtgtcagactcacctgagagagagctcttaaaatacagattcctggccagacacagtggtgcacgcctgcaacctcagcacttttgggaggagtgctttgagcccagaagttcaaaaccagcctgggcaacgtagtgagaccctgtgtctttaagaaaaaaatcttttaaatgaaaaaatacaacttcctaggctctgcccccagacttagcgagagtctctgcggcagaggcctgggaatacgcactgtcaaaagctccccaggtgattgtgatacaatgacttcatgtcctagatcttgagacccactgcccagtgccagtatggaggtgttgagttcaagttgataaataggctctttttggcccttcattagataaggtgttgtagttttcctgctgttgcttataattccatctgaaccattgtcctctttccttttaggtgaggagaattcgtgttgcaaactgcaataaacataaatcctgttcggagtgtttaacagccacagaccctcactgcggttggtgccattcgctacaaaggtatctcctgaattctttctcaccaactcgcatttttgaaaaagtgtcatgcggcagaacacttgttgccctactttaacgatccattccagtgacctgagggaactgatctcttcctcgactaaaatcttgttgtgcaatcctaatgaattctcgaaggtgtttccagcggcgtccgtgctatgcaatcactggacccgggagctccccagtctcggggcgggaggggcaggtgtgcagccttcaggagaacgggagagagcaggcaggtttggcttttactttctccagagttcgccaagactcaagagagaggcaaaagggccccccctccgagaagataaaagaatagagatgtctgaaaatttttcagctgaatccccatcatgtatgtcatgtattctgttcgctccgcagaagcctcgttattgatggcgccgtctcctaatgcgccgcgcagctgtgggcctgatgtacaatctcagtctccgggcagaatctgcccagcctggtctggaatgacgatgctcacgacccatctaggctcaggggcgactcggagcggcttccccgccatggcagtttcctagcgtcgctgggcccggcctggttggattcgccgtcgccatggcaacccagtactggggctcttgctggagaagcaaaggaggagagagccttcgctgcagctcaggcaggaaagagagagagagagagagaaaaaaaaacccataacagtgtctgtcagtttggtgctttcagtttttaaaggtgaaaaggataagaaagagcagagcaggtggagagatgctgaaggctgaaccaggggacagtttgggtttagaaaagagcaggaggaagagaattggtgactgaagggggagacagccaagagaaatgaagggagagggggaaatgcaatacaagcaagaggtttaggaaacaaatcaaaaatacggggatggaattaattaagagttcacgggggaaggcgcaatccgagctgcagcaagaggaataattgcccctgccatttgctacgcttccttaccgggctgtttccgtcagagtcactggcagacaaacgaagcaagggccagaaaaatgctcatgaataattcactgatcacgaacgggatttgtttgttgcacactcagtgagcagtcttgccataatcttttagatccattcatttatgtagcatccctgtctgtatttgtagagctgtgtacaggagtcaattcgataatggtggcgatgatggtggtgattaaatagccacatggagctagcggctaacgtattaacaagctcagctctggagcttttgggagatctccaagctggtgatatgaatttgggagttggtagtattttagatggtacttagagaagccttaagaccagacgaaggagtgagtgttgattgaggagagaagtttgagaactgggccttgaggggctgtggtgtttaggggttggggagaaggaggggaaacagaacaagaaataaggagggagcagtcagaaggggaagaggaaaaactggagagggtggtctcctggaagccaaggaaagaaaggaggaggaagtgatccactgggtcagattcagctgagaggtcaagcaggagaagaaaagaatggatcctttgcacttagcaggtgacaatgggtgactgctgggaatgccatggttaggagtggcgctaaatccacaagagacaatgggaaaataagaccttaagaagggacagcttagagaagctttactgagaaaggcagctgaaaaaaatgaagcagacactgaaagcgaaagtagagtccaaagaattttgtctttttgtcctttttttttttttttttgagatggactctggctttgtctcccaggctggggtgcagtggcatgatcttggctcactgcaacctccacctcccaggttcaagccgattctcctgccgcagcctcccgagtagctgggattaccggtacgtgccaccatgcccgactaatttttgtatttttagtagagatggggtttcaccatgttggccaggttggtctcgaactcctgacctcaggtgatccgcctgcctcagcctcccaaattgccaggattacagccgtgagccaccacgcccagccagttttgtctttttaagatgcatgaaataacagtgcatgtctgcactgttgggaaaattccagaagagaaggagaaatggatgatacaggagagagaagggttgtggagtgttcagtctttcagcaggtggaagaaaatatgacttggtgtgccagtagggaggccagcctcagacaggagcactggcccctcaccctcagtggtaggagggaaggtagggactctgggcccaagcatggggaggtggcagaggcctgtgtggtgtcttctcctattgctcacattattttcagtggcctacggccattgagaatgaggtgagggaggaagcactggaggtttgaggagaaaagagagagaaggagtggactggaagactaggagggagaatagaatagggaaatatcgagcggttgccaggaagcattagggcccacttgaggttgatggtcctgtgtttgaagtgagagctgtaagcatggttttgtctttctcaagctgcgttcagctttggtggtatagctgtagactcagaaaaagttagctttagccagtttgggggctttgccggaaaatacatcaagaaaggagagagtggccagggagctgagggagcatgtaaggaatggatgatgatatcgatatggatgttgattcatataatgatggcacttgggctctaaggagggaaataaggacctgataggggtagggatgtgaaaaggtggcagggtctgtgttggaagttcaagttgagtttaaagattgttaggggcaggcgcggtgactcacacctatattcccagctttttgggaggccaaagtgggtggatcacttgagcccaagagtttgagaccagcctgggcaacatggcaaagaccccatctctacaaaaaatatgaacattagctgagtgtggtggtatgtgcttctggtcccagctactcgggaggttaaggtgggaggcttgcttgagtcccagaggtagaagttgcagtgagctgagatcacacctctactttccagcttggatgacaaagtgagaccctgtctcaaaaaaaaaaaaaattgttggaactagagaattggaaaggggaattattggactgtgggggcttgatattgaggtcatggagggatggagttattggcaatgacagggtctgccatatgattgtcaagatcattggcagagaggtgtcaaggaactgaggtggttaccagagtactaaatggctccatcatctgtgtggaaatcgcagtcaccaagagagtgaggagctacatattcaaggaacgaagggaagtggccagggctggggtggtctgtaatgatcacaatgaggagggacctggggtggtttgagctgacagcatgggctttgaagctggggaggaagtgttggaaagagagaagaaggatcttccagaagaggctgcaagacacaaataggacagctagatgagggagaggaagcagccaggccttgagaggggcctggggaagctgtggcctcgaaggagagctggtttcagtaatattgagaaggggaaaggaacaatcagagaagaggttgaagacatgggggcttctgttgataactggctgtgagttatagtcttttgtttgttttgagacagggtctcatcctgtcacccaggctggagtgcagtggtgcaattacagctcactaaagcctagacctccccaggctcaggtgatccttccactgcagtctcccaagtagtggggaccacaggtgtgcaccaccatgcccaggttttttttgtattttgtagagacggggtttcaccatgttgcccaggctggtcttgaactcctgggctcaagcaatcctccttcctgggcctcccaaagtgttagaattagagacgtgggccaccacacctggccaaaagcctgcttctgctcttgctccctcacccctatcccagtgcgctccaagaagagtgattcatttaaaatccaaatcagattatgtcactccccagcttaataccctcccctggctttccatcttagaactcagtctgactcccttgctgccagggcctgcataccaggctttccgtgatctggcctttcaccacttctctgacctctcatgccattctctcctttgtttacttaaccccagacatcctgatttaagactatgctaagcatgttcctgccccagggcctttgcatgtgctgtttcctcagtctagtacattcttccccacatctttctatggcagactctttcttgacggtctggtcctagagcacacatctctctgcacctgcctacccagtcttcagtagcctccccttactcacagtgacattactgttttattttcttcatggcccatcactattaggaatgaccttacttctctacctctctttattgaaatgtgctcagaaaaacataagttaaatgaatgagataggctgagtgattggtcgactctgccaatagcaggttaagacttgtgccttaaatcttataagacattctgaagtcatggagcgatggcccttcacagccatgtcagaaaccacttggtttcagacagcctgggttctggcctacaatgaaatgaaactaagtctcatatctgtgactcatatgaagctcccagtaccattcaaaattaggaattctaaagggggatgttttcttataatggtagagcatcccactgtgtttattttaaatgtcatggatttatttagaaaaataatttattttctctgttgagaaggttgagttttcttgcatacatgtctagaaagtggaatggtggggagaggcaagaaaactatcttcacttccttttgatcagatgttaagaataggcatccagactgggcatggtggctcacgcctgtaatcccagcactttgggaggctgaggtaggtggatcacctgagatcaagagttcaacaccagcctggccaacatggtgaaaccctgtctctactaaaaatacaaaaattagccaggtgtggtggtgcatgcctgtaatcccagcaacacgggaggctgaggcagtagaatcacttgaacccaggagacggaggttgcagtgagccaagatccagcctgggtgacagagtgaaactccatctcaaaaaaaaaaagggaataggcatctagtataagtagataaaaagcaattagataaacaatgagctctaaaaagtctagtattttattgttggaacctcagatccaacctgtgctgaatttgtctgtgtgggtggaaagtgaatttttgcaggctgaatatcttgggtttggaagcagtttctcagtttctcccatattgcaaagcatagcacatgtgttcagttatggatttccacaaaactggcaatcccgaaccaatgaatgggtgaggttccaaaagttcatttgcaagtttgtttggcatgcagaatgcattttcccatagaaacaatgtcataaattaaggattgattcccaagccagcccataaaatccaaaattatttaatttcaacaaatatttattgaacacctagtgagagcctaatctggggcatgagatagctaggtagtattgagagaaatcggatgccattcttggctttaaggaactcgcatgctagctgggaaggcagacttatcaatggccaacattcattcattcaatcctacatccaatcacaaatattttttaagcacaacaatgtgctaagtcctatgctcagtgctcaggatacagttctttcttgtctctatagagcttgcaatctaatgggggatataatgtgtatcagttaggtttctgatctagtaatgctgtataacaaacaacccccaaatccttagtggtctaaaagagcaaacatttatttacatttgtttttcatgctcatgggtcagcctgtcagctatgggaagaagggtggggtcaatgtcaagctgaaggttgagttcaggtctgtttcccatgtttctcattctgtacatgctcttcttaaggcacatagaagtagcatgagagaccaagctaaactagacaacatgttctaagccctggctgacatcatgctgactaatattccattgataaagcaagctgcatggccaagcccaatatccatggagtagggaaatatattccacctactctagtggaagattctgcaaagtgacctggcaaaaatgtagtgtgggtgtgtcattctagtacaggatggattgaagaattgggagcaataatccactcttatcaataagtaaaggagataaatgaatagagtgtcataagagctagcatgggggaagtttagggtttcatgggggcacataaaattatctaacccaaacttaacaggtcaaggaaggcttcctggaggaagggatatctaatctgaacctgaagggtagggggatatcagctaggtaaagatgaggcaggggaagctggtgtagggaccaggctgtacaaaggccaggagagcttggcctgaagctcagtgtggacgagcttcacattaaagaatttgaattttgttggaaggaccttggggagccattgcagggctttaattaaaagtgcgaccagatcaggtgagtgttttagaacgagaactctggggtgcaaggtggaccggaggggactgagaagagctggcagatcagttagcaggtggctgtaaaccagtaagagaccagggactgaattagaatgatagtagtggtgagggaaggaagtgggtggattagagagctatttagaagatagaattgacagggcttagtgattaattagattcccctttgagtctgacacactaaaaatagggccataaaatgaaaaataaaatctcaaggtggccactgtttttctggaagatgtatcctttctcctttgatctcagtcttcatgaagaaaacaaacaagtgatacccacatgtacacttgattcttcctgtgtcccaggcactgggctaggcaccaggttagaccccaaaagatgggcacctgagtcaaatgtgggagggcttctgagagacaccagcgctgagtctcagagtgtgcagtggggtgagttattgcattgaagctggtgttgagattacagcggaaggagtgcaggcatctggctggggtgaccagatggacagaggtgtcggttactgagtagggagtgtagaaggagtggcctgtttgggctgcatgggaaacgcggggggtggacttccacactggcaacatgggcaggacagcctatgaggacagaggaaaggtcctgtgtttgtctgtttttgcactgctataatgaaatacctgagactgggtaatttataaagaaaagaggttagttggctcatggttctgctggctgtacaggaagcacgatactggcatctgctcagcttctggggaggcctcaggaaacttacaatcatggcagaaggtgaagggaaagcagggcacgtcttacatggctggaacaggaggaaaggggggttggggaggtgccacacacttttaaacaaccagatctcaagagaactcaccatcacgaaaacagcactgaggaaatggtgctaaaccattcatgaaggacccacccccatgatccaatcacctttcaccaggccccacctccaacactgaggattacaattgaacatgagatttgggtggagacacagatccaaacgatatcaggtcccaaatgcattttgctttggatagaatctgggctttgtgtgacctgccagtttcttatctctgccacttctcctcttctataaagtggcatttataattggccaggtattgcaaaaaagtgctgggattacaggcacataatcctgggattacaggcactttgggaggccgagttgggtgaatcacttgagcccaggagttcaagaccagcctgggcaacatggtgaaaccctgtctctacaaaaaatacaaaaattagctgggtgtggtggcgcatgcctgtggtcccagctactctggaggctgaggtggaaggatcatttgaacataggaggttgaggcttcagtgagccgtgattgtaccactgcactccagccttggtgacagaacgagaccttgtctcaataataatagtaatagtacctgcctcagaggtttgctgagagaattaaattccataacgtacatcattgtaggcccagtgcctggctcctggtaggcaacgaagttgtgtcaactgtcatttggtggaagcccaaggaggcagtcattacttgtccctgaggttgggaaaggcttcaacgaggaggtggccttaaaattggccttgaagcctgggtagaccttcaccaggggaagagtggtcgggaggcatttcaggcagaagaatcagcgcagtgagaggtctgtggagagactggcagatggagttctatgcactggctgtagaaggaaggaagtgggtggagatgctgggtgggctctcagggtggaccttactagcgggtgctgggaactcatgacagggttttaagcagaggccttccagcgccatatttgtgttttaaaaagattatcccactggcagtgtggaagatgaaccacgttaatccaagtctctcccggcctcccaccccacccttcctgggtcactttcctctggtgtgttttgtaaagagagagtttatgtcacatctcgtcctgagtcagttacttggtggctattctccgaattcatgtacctccccactgggagaggtagtacgtctcccagtgcatccatggggccccacttgctctggttttagtgccatgatggaatcagggctgggtcctcttcagaaaatgggccctacaggaaagagcacacttgcattcaccctcccaacacttcgtgctccaccctgcactgggtacacacaggtggaggcaaggcccccaggcatgctgcttataaggtatctgtatgcgtccttcaattatctgtacaaatttcacattcactccatatttttctacatgtttcttccatgttgacagttggaagaccttcaagcagcccctggtggctgtttttaggtcttcagctgcagttaggctgttccacgcatgagatcgtgaaagagatcatttctcgctcggtctaacagcagggccctgtggtcagtcttcctatcagactttctgaagggttgggaataacagaagggtatttttaacacatgagagaaaactgccatctgaatgctaaacatatttgtccccaacaccccagagtaacaaatgaaaagaattacatgagttgcttgtggacacgtcccagctcctttttttatcttgctctcctgtcttgagggttcttctccaagtgacactccttcctcaagccccccaggcctatcattaacctgctgggatccttcccaccaggactgtgattgccctgaaacttgaccagtataatccatggtgcacagtaatttatggccatattcttcagtagcctgagttagtctgttctgtcatcatgagaggtgagctacatacagcagagagggcccgatagggcttagatgttttgtctcctccaaatctcgtgttgaaatgtgacctccagtactggaggtgggcctgctgggaggggtcgggtcatgggaacggatccctcatgaatggcttggtgctgtccttggcaatagtgagcgagttctcactctgagttcacaggagatctggttgtttaagagagtgtggcacctgccccctcacagtcttgctcccaccctagccgtgtgacacacctgttctcccttcgcttccagcatgattggaagcttcctgagcccctcaccaggagcagacactacccatgcttcctgtacagcctgtaaaatcatgagccaattaaaccccttttctttataaattatccagtctcaggtatttcttcatagctatgcaaaaaatggactaacacagggtcacagaaggctttgcagtagaaaagtccagatggatgtgactgttcctcattcagaaggcggctgcagtgccccttccacagggagcctgcctcgagtccaggcctggccaggagacagtgtgcatgggtagagaagaatatgcttatcatacattagacactaccttgcacgttctgtgccatgttccatttagtcctcctggtaccccatgaagaaagcactattacaatccccacttcttagagaacagccttagcttatgtatagtttcccacagctgcagaaacaaattcccacaaacttggcagcttaaaacaacatgcacttgtgatcttacagttctggaggtcacaagcctgcagtgggtttcactgggctgaaaccaaagcattgacagggctgtgctccttctggaggcccttctttgccttttccagcttttggaagcagccagcattccttggctcatggtcccttcctgcatcttcaaaaccaacagtgtggcatcatcagattacattgggcccacccagataatccaaaataatctgcccattttaagatcctccacttactcacatctgcagagtcccctttgccatgtcctatggtttgaatgtatcccccaaagttcatgtattggacacttaatccccagtgcaacagttttgagaggtggaacctttcggacgtgattaggtcatgaggactctgtcctcatgaatggattaatgacattatcacaggagtgggttagttattgcaggagtgggttacttatcacaggagtaggttcctgataaaatgatacattaggcccctttctctctctctctctctctctctgtctctctctccctcgtgctttcttgcccttccaccatggaatgatgcagcaagaaggccctcaccagatgcaggccccttgaccctggactgcccagtctctagaactgtaaaaaataaatttattttctttataaatttcccagttagtagtattctgtaatagcaacacaaaatggactgagacaccatgtaaggtgacacagtcacacattccagggattaggacctggacatctttgggggccattattctgcctactactggttgtacaagtaatggattcaactctgggcttagctctagctcctaagccattagagcaaaacaaagagacacaggcaagggacattatccctcatggcagtgggtggagaggggagagcctggagcaaatggccctaatggagcatttgtgataactgctatgtataagaaagacacggcactcagggcccacctgagtcagagaaaaccctccatcttgaaagcttaggcaaccatgcattcatttaacaggtatttactgagtacctgatatgtgtcagtcactgtcctaagcactgggattctaagcactagcagtgagtaacacaggtcaaaatccctccacacgtatgttcattgcagcactattcacattagcaaagacatggaatcaacccaaatgcccatccatgatagactggataaagaaaatgtggtacatatgtgccatggaatgaaaaggaatgagcagccatgaaaaggaatgagatcatgtccttttggggatgtggatggagctggaagccattatcctcagcaaactaacgcaggaacagaaaaccaaataccgcatgttctcacttataggtgggaggtgaacaatgagaacacatggacacagggaggggacaacacacataggctcagctaatgcaagctgagcttaatacctagttgatgagttgataggtgcagcaaaccaccctggcacacatttgcctatgtaacaaacctacacatcctgcacatgtaccctggaacttaaaatgaaaataaaaattgaaaaaaaaatccctgccctcatggagttccctctagtgaggtgttttagtttcccaaggctgccataacaaattactaccaacacaaatttatcgtctcccagttctggaggccagaagtctgaaatcaaggtgtcagcagagccgggctccctctggaggctataggggcaaatccttcctcacctctcccagctccgggtgactcctggtgtttcttggcttggggtaggataaccatctctgccttggtcttcacatgaccttcttctgtgtgtccaaatctccctctcctttctcctagaaaattcccattcactgggacaccctaaatccaggatgatttcatctcgacgtccttaactctttacatctacaaagaccctatttctacataaggtcacgttctgaggttctgatgggcacgaatttgggggaacactctttaacgcacaacatgagggaagatggacagtgtgaaaataaatgaggaaagagagaacatgtcacagagtaaacagggctgtgaaggaaaataaagcagaaaaaggaaatggggagcgctagttggaggcagggggcgctaaatttaaacgggagccctggaaggcctcagtgagaaggggcatctgagccaagacccaaagggacccactcagttttggggctatccgccttcatgggctattgcactattgagtggaatggccgacaatttgagacagaagagccttcctcctttccttccaatccgggatgtgtccttgtgcagatctcaagcttgacgtctgtgcggtgacacttctttatggtccagtgaggctctaatgacagcaataatgataatggaattggggatggcccctccttctcgtgtgaggaccccattgtgccgactaattgtgtagaagcaagtaggacaactgtctgtggggtggaagcggtggggagcaaagaggaatatgtcctttgggcctcagggaattactgaattaccgttgtgtgggctgagtccatgcatctgggttactgtgaatgctggaagggatttggggggctttccaacaccagaaggggtctgggggtcaacctgtgtcctgtgggttctctacctcctttttcagctgtgagaggagctatgagttctatgtatttcaaagcagaaggcaaaggggatagcagtgctaaggggcacctctccacccttggtgtcccagacagttggcactgggaaagtgctcgccatgctcagaagccaggcttttttgtttgtttgtttgtttggttggttggtttttttagatggagtctcattctgttgtcaggctggagtgcaatggcacaatctcggctcactgcaacctccacctcccaggtccaaatgattcttctgcctcagcctcctgagaagctgggactgactacaggcgcgtgccaccatgctcgcctaatttttgtatttttagtagagatggggtttcaccatgttggccagtatggtctctatctcttgacctcgtgatccccctaccttggcctcccaaactgctgggattacaggcgtgagccaccatgcccagccaggtttgttttttgtttagtggagctagtaactgacgttctcggacctcagcctccgtgctacttacctgcaccatctctaatggatgctctctgacttccaacaagcaccattaagaacatcccttttagtaaatatatgttgtaatggaatagatttttttgaaatgaccttatctcaggcagcatgcactttcataagaatgtattgattggcctttaaatattcctcaaatgttttcacttgtctctgtgacctaatatttgtcctgttcccagcatctcctccatatccaaacacaatgttcaggtcttcattcgaagccttcctgccagtcttttgttttttgctttttaaacattttgatgcttttattctgctatatggagggtgcactgtttctgataggccaaatgtgggatttgatattgctttcaggaggatcgggttttaatatcattgccacctgtttagtggtggagaaactgaggcccacagaggctaaggaatgtggcccccagttacacagggagtatatgggagagcagctttgaacccagacccttctgactcaagaggtgtcattttcccatttttatttccatgctgctgtttttttaaatggctcccctaaattatttagttcatggtttgcatttggaaataaacaccaacttttagtacactcattgcccacaaaagaaccacatggagcaaaggccacaaacccattttgtgtgagtgtttcagtctgcaaatgtgttttttatgtgctaaatagctcaaagtttcaagacaaaggctgtttttccaccacgccagtgaacaggccaacctagtgaacaaaaatcaatgaaatgacttctgctggtatcactgaaacacagacaagaatttagccattttaaaatttccttgttaatccaattcagctaccttttgttgaatcccagccatgggccaagtcctgtactaggccctgggggaaacaaagatgaatgagggtctactctgatgaagttcacaggtgagtgtgggaataatttcaatacactgtgtaaaatgctctaatagctggtactcaaggtatgaaaggactccaaagaaccctttaatatttaggaggaaacagagctgtgattaagaatcccccaagaagcctcgaattgtgtctgcctccttacatagaaaaggcatgttgggcattgagctggtgtgtgagcaatgccaaagggcatctggtcaacctcattgcccaaatccctttctcatcactaccattttgtctttggcttatgtcatccatttttttgcctaaattttctgttccattttcccatataatataataataataatgaatatttattgaggcataattgtaaactcttagaacagatgtacatttttctcccaacttcatcaggtgaaaactattatttgcatttctgcagatggagagcctgaaacacagagagggcacatgtcttgcttgaggtcaccagcttgcaaatggcacaaccactatcctccttccttcactaagttctagccaagctggtctatttcatcagttccttgcagagaccatgctttaagtgcactcagatactttgcacatgctgttccttctgcctggactgctcttcccactacttttttttttttttttttttttttttttttttttttttgagacagagtcttgctctgtcacccaggctggagtgcagtggcatgatctcgactcactgcaggctctgcctccagttcaagcaattctcgtgcctcagcttcccgagtagctgggattacaggaatgcaccacctcgcccagctaattttttgtatttttattagagacagggtttcaccaggttggccaggatggtcttgagctcctggcctcaagtgatctggcctcccaaagtgctgggattacaggcataagccactagcactggcctcttcctactactcttgacccgactacatggttctcacccttgaatgcttagctgaaatgccatctttcttcactagcctgtctaaagtgggttcctttctactatatctttggtttctgcagaagacgtacctcaatttgaaattattttaaatgattgtctgtttatttggtttttgtctatgtgcttctctggactgtaagctcaataagagaaggaacttaactggcttatccatggaagtgtctgcagttcctagtggagtgtttggcatctgatgggctctcagttaatatttgtagaatgaatgccaggtatggtcttaggccctgagggtgcaaaggtgaataaggtgggcctttccctttgggggatttacagtgtagctggagagacaggcaggcaatcagcaactaatgcagtatgctgtgtagagtaggagcatgtgtaaatgtcatggagacacagaggagggagtgactgctttgcctggagtctgagcaaacatcatagaggaagacactgaaatagcccttgaacaaggaatgtgatttcaccaagtgttgcaggcccaggcacgttcagggcagtgaggatggcacacgctcgggagggcctggcctgtttgccctgtatgtgtttatcaaatgcctgctctccacgaggcactatggaatagataccagggatgggtgtttttaggagcttgcagtctagagagatagactcatcaaccaaacttacctggggatgagtttgaagaggaaggcaggggccagatcacagtgttggggtcagagatgggcatggaaacatgtattgcagactgaggtgctgaaaggcatgtagacaggagagtctggtatgggagaaagggtgtcatgagagatttttaagcagggagtaacatcatcagctctgtgcgtaagagtaacccagatgttgatgtggaggttgatgagaggaacaggaagtgggaagcgggagacctcatttggctgctgcaggaacccaggtgagaggtggggggtaagcatgggttgtagaggatgcttagaattcgtttgggtacaagagttacccaaactagccaaagtaggcacaaagttttgtaatttgatccgccgtgaggattattgctcattaaaccagaccaggtagtggttcccaacatgtgtgactagaatttctcatccctcagaacatccttcaacaaaaaagctggaagatggtacatcattcattcttgtctcagaaagttacaaagcacagtggcatctacaaggctctgagaagtcctgcagcagagagacttgtttaattttatttaactagtgtttcccaagcttcttggcaatagaaccctactttaatattaacaccaaaacaaatccaggaacacagtttgaaaaatgctgagaaattgagtaaaacttgtattttcctatatgttcatgtcttggaagaatctacttgctattatgctggcatttgtgatgtcgctgccctggaagccttcaaaatttttgagcaattaggtgtagtagtaagagatagatgccagtgccagacaccatgctaactaacctctctgcacctccgtttctcaacctctgacatggaggtggtaacaataacacctacttcatgggctggttgtgaggattactgtgttaattcccagaagtccccagaaacagtgcctggcctatgggcactaggaaggtgcgatggtttgaaaatgtcacctaaaaagcgtgtgttgggaatttaatccccaatgcaactctgttgaaaggtgggacctagtgagaggtgtttaggtcatgagggctctgcctttgtgaatggattaatgccaatcatagaagggcttcaggctgcaaattcagtctctttctcttgttcacatgcgcatgccctcgctctctcttgctcttccacctcctgccatgggatgattcagcaataaggccctcgccagatgcaggcccctcgaccttggactctccagcctccagaactgtaaaaaataaatttcttgtctttataaattacccagtctgtggtattctattatagcaacacaaaacagactaagacagatgggctcagtcactattagctattctgagaggcaatataggtagctgatgagaccacaggctttgaggctacactgcctgacttagtaggtcagctcctctgcttactatccctgtgaccttaggaaagcaatatggaaccagctatgcctcagtttcccacatctgtgaagcagggacaattattgcagctacttagaggtttgttgtgaataataaatgaatcaaatcatgtgaaaagacatcgcctggcatgttagatgtttttgcttaaaaaaaatcttttaattgtctctgttattagcataattttatcatgtagactgactttcagcttcagtgatgaagatccaatttttgagctttcccagcaagttattttggtcttatgttttggcattcccctcttaaagagtctggaggcctttcatttgaagtttagtttgtcacagacttcctattctcgtccattcagtagactttggtttcctcatctcatggactggcaattgtaaagaaagtcccccgattctggagaccacctcgcccctccactgggctctgtgccttccctaaaaatgcagacatctgtttcaaatcacttagcaaaagaccttgggttgctcttatagcaaagccctcccccagcatggatgcagtctcttgtttcctgggagagagagaagctggattgtttccttgttaaaagttttctgatattatatcagtgtagaatctttggaacagttcacactaacccccacattcaagccacttacctgatatgtagttatcagattccttcagggactgtctgctcttggtgaacaattagattagaggatgctgatgaaatttgagtggcaggaagtagaagttacatttctgagttcagagtttctatttcaaggttgagtaagtggtaaatttttactgcaagattctagcctaacagagttggcttctcaaggtcccccagcccggcccatgggtatttcacctgcttggaaacttcagctccttttcagaggtgggcctccctgttctttatgttggcatgaaaacaattaataatttaagccatgcccattaaaaaaatagaaatgctgtataaatacaatactgtaataataaatttaaaagtcgatccagctgggcgctgttcccacactaccagctgagcagaaacacaaataagtaaagaagaaaactgctatataatgcaaatggctgcaatctcattgttttctgctattgtttattgcaaatatatagtagtaaagttacattatggataagtaggttttgtgggctaacctggaaacctaatcactgtttataacattatttctatgggggaaaaatgcattttatattagaaacagatggtttgcaagaaaacctttttgggagtagaatggatttctaagtccagggccgcctgaaattttaacctcttgctagttgtgtggttgtgttgtattcacagctagtgatagaggaaaattagaggcctctcagaatgcccacttctgtgttctcccccaaatccttgctaaccgcttcatcctacagtctctgccttaccttctgtcttctctgtttctggggtccccatccctgtgtcctcatcctggcccagctccaccctgcaaccactggttgaggtcccaggaagccaggaggaactatgaatgtcctctattaagtggtggttaggatctataggaaggcatgaagccagggggccaagtttgtgggctctgaaatcagacttctgccacttggcagctatgtggccttgatatgttactgtacttctctgagcttctgtttcatccgtaaagagtgaggttgttgtgagaactaactgcaaacactcccatcagtgcctggcacacagtaatgtttcctccatgccagtctgtggtggggtaattattcagggatattatgggttacacatatttctatgaacccaggaagcaaacccactgtatataaagactttctaagttttcaaacagtgaacttagaaacaagtgtctgggaccttcctgtttatgacttggggccggagtaggtttggaactttttttttttttaaatctgttgggggtgagggagggggcggttacatacttatatagttgaatgccaatatcaaactctagtattatctcgaatacattaagctctacagcagattttatagcaaactaacaagaacagctttcttaaatagtttcattgactgaattgtttctacatacagtgtttttcacataagggaagtctttttaaattaactttttggtttgggggatttttttttttttccttcaggcaatcttttctttgcatttgggcaggttctgtattctaatttgcaaataggcttgtgtctgcctgcaggctttatcatgaaagtattagctctaagtggaaataaggactagaaaaataaaatactgactgggagtctgaggactttgggatagatcctcagtagaggatggagcaaaagtaatagtaagtcaagaaagcaaatatatctctaccagtttccctagaatatgtccattcttatccaaatccaattttcctcctattcttggcctgaagaaattgaaatgaagccattaagatatcagcctatctgagagtgcatcactgaagaatcagcctcactaagagtcctgtgtgacaatgagattttaatttaattagggcagtggctcaagtgtttatgcacttgaccgttgctcttgttgatacgcaggaattagagtgatagctttcaaaaggaattatttcagagtaactagctttgtttactaaaatatgggagctataagatctgctctgtaagaaatgtaaatgtatgagtaatatgctgtcatgaagattttataatctgcagtatttgagaagtaataagatactgttgttggctggccatctggttatacatacttggtgtcatggtttgctttttattttttcattttttatttgtactggtgagaggcaaagaataggagttcagaggtggtgggttgtttttttatatatatataaaaacaaggaatttatgtttagttgcttaacatggttagattttgtttttgccttatgcagaataaaaaatgaaaggttcattttatactttcttttccctttttttttcaaaaagtaaaatggaaacctcacccccaatttgtccccagatttaaactttttgcttgttttaaaaatagtctctttggcatgaggaggagtcagacatgaattaaaactctagaaagaaaaatcagcaacagaaaagacctatagagatttcatatttcatcctttcattcaaaaatatttattgaaaccctagtatttgcatatcatgctgccagacactgagggatttgctaaagaaatattaaagaccttctcccttctttgaggagcttagagcttacttggggagaactgagatagacttatgaaatagttaagttgtaattcgaggcagcatatgattaaataccgaaatatgtacttctgacaagaaatgctataggagttcagaaaagggagtgataactcagtggcactactgttttctgcctacaaattggcaaattgtagcactatttgtatgaaatattttacacttgtttttttggcagccttaggctttgactcccaggcagcattaagagccaacaaaaatatttgtactccagtctcttcggaattggcttatttttttttttcttataggcagaggaagtgccttacacaaaccggagtgcccatgagaggcagggagtttttgacagtcatgatctatttcagatacaaccgaaagaaccagcttcgtcattctgtttttcaatccagcagtgcttgtctctccgttgcaaactctctctgacattgacaggcggtttaatttgaacttaatgtctttgacggatgagctagccatcaagggtcagataaatttatggctttggagaattgccgatgaaaatccccatggttataatgttggagaagaaactgacacagatgtagtgggaggtggaacacagatgtgcttattgggagcagggttccccaaatgtcagaagccggtgacatgctaaaggtattgtgcttggggatgacgtttagtgaaactcactgacttcctgttctatttttgccatattcaaattaacacagagctcaaagatgaagccatgaggcctaaattcttaagaattgaaagagagagagagtagagaaaggagaaaaaataaaacctttaggaagccaaatacactgtttgggcccatccattcctcattccgctcggatcccctccgggactccccgtagctgaatgtggtcatcatttggttgcttttcaatctcatgattcatgtgttttcagtttcttttaaaaattcaccatcactggtttaccacccctgcattttaatcttcagccttgaggaggtgtagtactagaaatatttcgttctttccttgatgctattcaatggaatatctgtggagtccaacaccctttggcgataacgtgctgttggtatttgttcttcttgccaggttggtgccccgtctggtgaggcaagggttcccaagttagtgtgacctagagtgactgacacatcaagcaagccagtgatctcaccactcagcttctgagcatctctttatcaaagtagttggccctggccacagcttaagacttatctgggtcagcctctgagctggctgacttgggaaaatggccctggaaaaatgtttcacctatatcttttgatataatttggtatctgtctaaataaatggtatgtagcagatggttatggaatgtcttatcaaattcttaggcagactctgcccttgaaatttttctatttaattatcatactgcaaagcacaaaatagtaactttgttattatttttaaacaaaatcaagttacacaataggttgatattctgagaatgaatagcaaacctaaaatttatacaatatgtgaactcttccttgagctgttctttgctaggcatttctaaaagggagctccctatttcagaatccatgggaggatgtgtttcagatatatttggcgatgtcatcttgagagatggctcaggagtcgaagttcaccatgttgtctacatttgttctttgctcctagacatgatggaaaaaaatgctctgctgttttcttgttgcttttcatggttttagcatcatgttcctattctcgctcaaatcaataatccactgtacaaggtctggcattttgtactgaagccaagtataagaaagttttaactaatgcacgtatggggtcgctgttttaactaacacacgtatggggtcgctgttttgttgcctcgtttttttaggtgcacttttcaaggagattgtgtacattcagagaacttagaaaactggctggatatttcgtctggagcaaaaaagtgccctaaaattcagataattcgaagcagtaaagaaaaggtaagaggaaagattttaatttgtcctcgttgtattgtctcattttgcacagcggatgctaaatttcttctgtgtgtaaaatatccattagcaatcaaacatgcttagtgatagcactccattcatttagcactcattaacgaatattgagtgcccaccagatgccatccactctgcaaggtgctggggatacagcggtaaccaagtcacatcatgggcctgctctcatggagtttgtcgtcttgtggagctgaagatgaccctcaatggttgaactggaagaaaagttggacttctaatgttgtagaaatacatattgcttttgaaaataaagaaaaaagaggttcagattcatggtcaacgagataccttaaaggtggcttaattgcagaattttgtttagtgtaatggtcccttatcctaatgtgttgaggcttccccagtaaccatcttatgaacatagcttccaacagtcttggtagcgatggagagaagaccaacatgggcagtgaccattgcaagtgaggtcctttggaaagccagtggacccttgctatggcagcaccactcttgacaacacatcagtcctgtcattggatgagagaagggagcaaggagcatatttaagcattttcaaatgcacacgccaaccgtgccctacggaaaaagggaattcctgccttgcagtctcagtggtgctataaggaggcattttctccctaatgacggctcttgtgttatgaataattgtacagagtcctctgttatgaataactgtacagcagccagctgacctgtctgttgagctcactgtgttctgtttgaatgccatattaacaaggaaatgggccactttctcttttcccttacactttgccatttcagagaaatagcaagaactttaccacttacgatgatttaacatttaataaaggagagccaaagtatttaatgagtgataaataataaaataatcaagcttctaagttgtaactgatcagaacgaacagatttaaagttatttggctgttgtcactttctgttgtcttcctggagaaaaaaaataataataataactttcatacaaacttctaccagtcctgaatcagagtgaatagatttggtggaaaagattcttaggcatctaaacataggtatatccaaattctaatttctctcatcagtctgaaaaatagccaaatttggcgctaatagagaatagtagaaagtagaataccataatccttgaatatacccaggactctgataagtggttaaaattctggaagattttttttcttatgttatttataaaaatttaaggataatacttcagctaaatgtagtgggaggaagtagcttgttcattaaattaaaagtgctgcttatacaacttccgtacctagctaggggctcactattacaaattaatcactgtttatatctggtctggtacatttcaaaactgcttaccacccaaacgaccactggtgttttcttcctcgccctaagtcccactgtggtttaccctaatcttcccagagacttcccacacagccactgcctcactctctccagctcaccaccactctcaaagaagataagaagttcgtaatttgactaaagctatcctttgaaaccaacttcggactaattattttaatagtgttgataagccatctgattctatctcttgatcacattatttcaaaatatttcctaccctattgccacctttggcttacctgaaaatctcaggtctttgtttaaataaacctgaccctgacctatggagacggcagtctagggttgtgttcagttccacctattagctctattcaaaggctatttgctacctgcctatcatatgcctagtaacattctagtcactttgtaggcagagaaaaacctccatataataagaacctctgttcacagaagctttatttctttccacaaaacaattaaaagatagtacatcctcatactcactatgggatcagcattaaaaagaaataatcagagcaattccagttgtcctggagggatttctgtgaggttttgttgagtaaaaacagcaagatgcataaaagtgttcctagcatgatcttatattgatcaaaaaatgcccctgtatatgtttatgtatatatgtctctatatgattatttgagcatgggcaaaaatatagaagaattcaaacaaggttgtaaacatgggctcccctggtggaatgactgatgtggtggagaaggaaagcagagatatgtaataaaaatagaaaagacggccgggcgcggtggctcacgcctgtaatcccagcacgttgggaggccgaggcgggcggatcacgaggtcaggagatcgagaccaccccggctaaaacggtgaaaccccgtctctactaaaaatacaaaaaattagccgggcgtggtggcgggcgcctgtagtcccagctacttgggaggctgaggcaggagaatggcgtgaacccgggaggcggagcttgcagtgagccgagatcccgccactgctctccagcctgggcgacagagcgagactccgtctcaaaaaaaaaaaaaaaaaaaaaaaaatagaaaagacacagaaataaaattattattgttattatttattatactttaagttctagggtacatgtgcacaacgtgcagttttgttacataggtatacatgtgccatgttggtttgctgcacccatcagctcgtcatttacattaggtatttctcctaatgttatccctcccccagccccccaccccccggcaggccccggtgtgtgatgttccccgccctgtgaccaagtgatctcattgttcagttcccacctgtgagtgagaacatgtggtgtttggttttctgtctttgtgatagtttgctgagaatgatggtttccagtttcatccatgtccctgcaaaggacatgaactcatcttttttatggctgcatagtattccatggtgtataggtgccacattttcttttcttttcttttctttttttttttttttgagatggagtctcgctctgtcgcccaggctggagtgcagtggcacgatcttggctcactgcaagctccgcctcccaggttcatgccattctcctgcctcagcctcccaagtagctgggactacaggcgcccaccactacacccggctaattttttgtatttttagtagagatggggtttcaccgtgttggccaagatggtctcaatctcctgacctcgtgatctgcccgccttggcctcccaaagtgctgggattacaggcgtgagccaccgtgcccggcctacgtgccacatttccttaatccagtctatcatggatggacatttgggttggttccaagtctttgctatggtgaatagtgctgcaatatacttacatgtgcatgtgtctttatagtagcatgatttataatcctttgggtatatatccagtaatgggatttgctgggtcaaatgatatttctagttctagatccttgagggattgccacactgtcttccacaatggttgaactagtttacactcccaccaacagtgtaaaagtgttcctgtttctccacatcctcttcagcatctgttttttcctgactttttaatgatcgccattctaactggtgtgagatggtatctcattgtggttttgatttgcatttctttaatgaccagtgatgatgagcatttttgcttatgtctgttggctgcataaatgtcttcttttgagaagtgcctgttcatatcctttgcctactttttgatggggtcgtttgctttttcttgtaaatgtgtttgagttctttgtagattctggatattagccctttgtcagctgggtagattgcaaaaattttctcccgttctgtaggttgcctgttcactctgatggtagtttcttttgccgtgcagaagctctttagtttaattagatcccatttgtctgttttggcttttgttgccattgcttttggtgttttagacatgaagtctttgcccatgcctatgtcctgaatggtattgcctaggttttcttctagggtttttatggttttaggtctaacatttaagtctttaatccatcttgaattaattttttgtatcaggtgtaaggaagggatccagtttccgctttctacattttttttttttttttgagatggagtcttgctctgtcacccaggctggagtgcagtggcacgttctaggctcactgcaacctccacctcccaggttcaagcgattctcctgcctcagcctcccaaatagctaggattacaggcacatgccaccacgcccggctaattggaataaaagtattccttaaacaatatggttcctagaggagagacactagaaactttttttttttttttgacagggtctccctctgtcatctaggctggagtgcagagacgtgatcataatttactgcagcctcgaacccctgggctcaaaggatcctcccacctcagcctcccaagtagctgggactacaggtgtgaaccaccacacccagctaatttttaaaaattttttatagagataaggtctccctatgttgcccaggctggtctcaaacccctgggctcaagtgatcctcccacctcagcctctcaaagtgctggcattataggcataagtgaccatgcccatcctagaaacattcttttacaaatcagaactaaaacaaggaattccaccatcgctaatactgttgacattatttgtaaagccctgtccactgcagtaattcaagaaacaagtaatacaaattattatttgaattaaatataaaaaacattacttactcatcttaagtggctgcatatctgcagaatctaaatatgttagctttaaaaattattcaaatgaattaacgttaaatgaagtgctgaatgttcaataaatatttaaatatcaataaccttactacatgttaaataaaacaaacttttaacttcatgaataaaaagtcctattcataaaaacaacagaactactcagccataaacttaaagagcaaggtacatatcctgcattaaaaccatttttactaagagatatgtgttggagtcagctaccaaaaatagtaattttgctttgaacaacttagcttaagccgttctttgtaatagtagttagatagcagagcagtggtgtattaaggctattttttttttttgagacaaagtttcactcttgttgcccaggctggagtgctgtggcgcgatcatggttcactgcaacctctgcctcccgggttcaagcgattctcctgcctcagcctcccgagtagctgggattacaggtgcccaccaccaagcctggctaattttttatattttaagtagagacggagtttcaccatgttggccaggctggtcttgaactcctgaactcaggtgatctgcccgcctcggcctcccaaagtgctgggattacaggcgtgagccaccgtgcccagccttaaggctatttataatttatcatagcaaaaccttattaattaaaaacataagcataaagaaaaataaaaacaaaaatacaccaagtattttcttagaatatatggaaaacatcttgaacatattcaggcatgttctacatttcttggtgagaagatatcataaaaatgtcacttcttcctcacctatttttcttgatttcatgtaattccaatgatttttgagttagtgtttatttaaaattaatataaaattcatctggaatatcatgagctgatcaagaatatccaaaacatattttggaaaaaaaaaagaagtcaatttaggcaagaccactcccattagattgcaaacatagatgatagatagatagatagatagatagatagatagatatcaaaaataatttaatccatgattctggtttaaaaataggaatatagattcatagaatatagtggaaagctcagaaatagatgtaaaaattttaaagaacagatatcataaaataagaggaaacaaaaattatttcataaaatgtgtgagataactggcttatactatggaaacgtaatttcatattttacattaaatataaaaataaaatttagactaattaagaaattgatatgtaaagcaaagtcacagaagaaccaacagaaaatgaagttgaacataatttgaaagtatgatcatttattttacctctgaagcaatatagtatgtaataacaaaagaaaaatattcatatacatgatttccttttacaaaaaataagagttaacttggccaggcatggtggctcatgcctgtaatcccagcagtttggggactgaggcgggcagatcacctgaaggtcaggagtttgagaccagcctggccaacctggtgaaacactgtctctactacaaatacaaaaaaattagccaggcgtggtggcaggtgtctgtaatcccagctactcgggaggctgaggcaggagaatcgcttaaatctgggaggtgaaggttgcagtgaaccaagatcgtgccattgcgctctagcctggctgacaagagcaaaactgtgtctcaaaaaaaaaaaagagttaactaaagcacacacttcaggaaaatatttgccactaacaaaatattcatcataatgtaataacactaagaaaaattaaaaagaaaaacatcaatacaccaaaaagtaagtgggccaaaacacatatattctcacaagaggagattcagaaagtagatataaatatggaaatatgttcaacctcactagttttcaaataaatacaaattaaagcgataataagctatgctaacacccagtgttggtgatgccaattagcacaacctttttggaaagcaatttggcagcatgtttcaaaagtcataaatatattcattccgtttgaagcattaatttcagccttagaatcctgaggaaataacttgaaagaagaaaatccctaggcatgaagatgctcttgccgtagcatttatagaattagaaacctggaaataatgaaactgtttagcaataacgaatgattcagtaaaataagatatgtcgatctgataagagtgttgtgcagcaagcaattctttggccttgtgaatgttgcgggctaattgacaccccagctccctctgcatcccacctgccctttaagtcttcactccctctttatccagcttgattcacgaaaaagccatcagcctggtaaggagtcctatactgggtttcttaggacgaagcttcagctttttaactgtactcgcctggaccccaagttacgcaaaaataccttcacctcactggctcctctctccttccactgcacctgaaaaaaacatgctgtctcctcttttcaggtccactccaacctggtttctgccccagtgttcccctgaacctgttcttgctaaggtcactagtgaactccatgcagccattccagcggacactgtaaggtcctcatctaacttggctgttagccagcattcttgaaactgtcttttccattgctttccatggcacgcccactccatgctctcctccttctctgtggccaggcctcaattcccttgctgggccttgctggtcccttccctccctgtctctaaatattggagccatttaaggcccagttttggctcttcctctcttcttactctacatttcgtctgtagacaatcttattcacttccatggctttataaatcatctgtatgttcatgtctcctttatccccaccccagattgatcctctgagctccaggcccatacccaacttgacacatttgcttgagtatcacacaagtatcttgaactacatacacctaaagctgaagtcttgaatcttctacccatctgcctctccatcagtatgccccatctccatgtatggtacctccatccatcccatttgctcaccagcatcctccatatccacatcccccacttccagtcctgccccatgccacttctaaggggtaccttgactgcctcgttctttcccttttcattgtaccatcttagctcagtcatttcttgatgattccttgataccatgtgaccttccagttttattctggtggaatgttctatacttctactagtctataagctctttgagggcaaggaccatagctgtttggttcactggtatattcagtacattgtgcagcacttggcacatgttgcaagcttgatgaacatttatggaataaataaatggaataattatagttatgtaaaagctacatatgtgagaactagaaggaaatgtggaaactttaaaagagttggtgaaaatgtgatttttaaaaattctgatactcttgttataacgtttgagtgtgaattcaatttaagacatatatgtatacaagataagatgtgtggtgcggatataaatgctgcgttgaagattgagcatgaatgagagttcaggcatttgttgaagatgagttagtgggaatggtttgggatctttcactgtgctcagaattccctaaagataattgaactccagtccaggtgaagtggactgaaagaacttgccttcttccagcatgataatatggccagaactttttgaaaatgggaagataggggtgacctccggggactagattagacttagcaagcttatcaaagaaccagggagacagcagagtcttaggtggcagtgcctaagtctgggaggaagtgagaagtataacagaagacagagagctgccaggttgtctagactatggctcttcatagggggtgataaggttaccacttcctgcactcccaggttccttttacttagcgctcattcccatcagatcccatcatgcgcctgatgcaaaaggagtccactgttggcatgttaattcctataatttcccttctgaacaggacacctggctgccttgttcctttggaccatttccttgggaaaaagttactttggggacatttcaagattgtctttttgtgtccctactatacacacacacacacacacgtacaggcacacagatgtatccctgtacacatacaaacatacacacacaaaaacactccctccacccaattttgatcatatgtttgaccacaagcaaaaccttaactaattctaaagcacatttcacaggccaccttctttaatcattatctaacaatattagcaataaggaatagttgacaaatgtatcttcacacctaggatcatcaaggcacgctgtcttaaatgaaccccagatcaaagagaaacagatgaaaaaagtcatgtgtttggatgggaataattaatatcataaagacagaaatttttctaacattaaggcatatatttaatacaatttcatttagactcagtcccctcaacccctttggataaaatgaatatagatgaataatgctcaggaaatggtaagaaaattatgaaaatagagataaagcaggagagatttgccttatcagatgctaaatatatttaaaattacaggagtaaaaacttaatggcattggaatagaagtagatcaatagattattagagcagagcagagttcagaaatagattccagataaatggaaatttaatataggacaaaatgatatttcagttcagtgggaaaaggaggtttgtttttgtttaataaatggctgtgacataattgattaaccatctggataaagttggacccttatctcacactgtatataaaaataaattccagatggattaaagatataagcttaaaaaataaagcaataaagatgttggaacaattttatatttgtccataagctagagtttgggaagcactttatagccgagacaagaaaccctgtatttgattactcaaaagcacattgtgtaagggtaaaagatgccacaagcaaaagttacaagacaaacaatagattaggagaaaaatatgtgtcagaaatatgacagataaagattaatatctacaccatacagagagctcttgaaaattgataagaaaaatatacacacaaagcagaaaaatggtcaaagaataagaatatgctctttacagaagagcaaaccaaatagccaacaaaacatctattcttttatatttttatttatttatttatttatttatttatttatttatttatttatggaggcagtgtcttgctctgtcacccagaaacatctattctttacatcagctcttctgagaaattctccctcctgtggcaggtcaaagggtgagatcatatgaggctctatgatggatggaaatgaggcaaaaatcatcattttttccccatatcttccccgcacagactacagtgactatggtgggaagcttctctccaagacactcaaagtgcatggtgaagaatgtggactctagcagggagctctgccagaataaaagtcagcccaaccggacctgcacctgtagcatcccaaccagagcaacctacaaaggtatgtggattcttctgggttatttttgttataaaatcaaaaaaacaagggaacctcctgagtttagtttgcccaaggaatatgaatagttccccctctgtagactcactccctcactaccccctggttcccacttttgctctgggtcctcctcacctctggtttacctcattcatttactccaagaccccactatcagatatgcctggacaatgacaagagaagggcaagttggataggagagtgcagaaaagccagatagcactgggccgactacccaaatggtttagataattcagagatctgaaaagcaagaaatgccctgggtgagatgagaaattttaacaaccaatgttccatcagtttgagttcattgcattcatacatccatccaggaagtatttactgaacatctactatatgtgaggcactatgctaggtactagggatacagtgactcccccttgcccctaaaaaaaagactgtacactgggatagagagaagtaagtagctcattacaatgcagtgtgtaaatacagggaacatagagtaccatgagaagcacatgaaaaatgtaccttaccagacatggtggagggggaaggggtaaggaaagcttcctggaggaagtgatgtccagacaaggtgagggtagagttgagccagacaaagacgatggggatgggtatttcagacagagaccaacctgcatgatggccaggagacaaaaagctttatttgaagaaccagaagagcttctacatggccaaggcacatggggtaggggaaggtggaaaggggagacggagggaagatagataccaaaggaggcagccaggggaccatgaagggccttgtgaaccgtgaatcctgcgagctgtgatgaaacactgaaaggtttaagccggaggctggcagcacaatcagatttttattacagaaaggttccattgtgcattgtctgtctttcctgctggaatgtaagccccatggaggcagggacttggagaagacatcttcactgctgtgcttagaacagtatctggcacaacgtaggcattcacaatcaataaatgtttcttgaatgaatgaatggcttgaaggtggagaatggaccaaagaagggaaagactgaaagactgagttccaacagatcacttggaggggtccaagtgagagagaaagtgaaagcggaaagctactggagggtccaggtgagagggaaagtgagagctggaggagaagccaagggggatggagagaagtggattcaatagatggtcagtaggtacggtgggcagactgaggactcctgagtctcttcgaatgagaaagactagaagtagagttgagttcatggagtaggtctccaggactgagtgatgatcattaatggagctgagtgggttttatggtgagagctggagttacccaatatcttagtccattctggctgctataacaaaataccttagactggataatttataaacaatagaaatgtattgcttacagccctggtgactggggagtccaaggtcaaggctccagcagattcagtgtctggtaatggcttggcctctgacttcgcagatggtgccttgttgctgtattctcacatacagaaggggcaggggagctctcttaagcctcttctataaggacactaatcacattcatgagggtgcagccctcatgatttaatcacttcacaaaggccccgtggcttaatactatcacattgggtattagattccaacttatgaatttaggggagacataaatattctgaccatagcacccaattgatcctaaatccttcaaaaggcaatttaatgcaccaggccagagaagtgagcttaaaaatgctctcagccactgggtggtggctgtttgggtctgattgcttggaaaatcacctcaattttccactttactttgtccacactgtgcagcctttgtgatgcatttctggttaattttgttcattaaaacgcagaccttgctcacctataaaatatgcctctaaagtatttgagatcaccttgtaaagctagttggttgcttttagcgcctccatccgttgcacccaacccttcacctgccgttttctgaatatcttacatattctgaacgggcaaacaaatttgcttcccagcctcttgtactcagccagccggtgaccattgccaagcctttatccatggccttctttaaacctagaatggcttccccctttcacaaaatcctgtctccctttctgctttgaaacattggagaaaagtcacctcttccacatgcccttgccagattctgctctgactttctcagccattctaacacccctttggtcctccatgcacacccctatcttggcacccaggttaccagagggaactgaaaccactcatatggttgtttccttgactgtgctgtcatcacctaaattattttacctcttccagaataactgtaaatgctttcctagaagaaatcatgaatattcatttccttgtgatatttccaaatagagttttgtgcctatttggtgcttgaaaaaaagtatgacttttgcagtcttcatcaccggacacttatagattccactggagtgtattttcactgggagtccctctgagctgactgtccctgtgttcattctactcacatgtatcaagtgtctgttcagaggcttttgcagagaggtcatgccagccctccaagcctctttgtcttgagaacagaagatgatcatttcacacacaccctctgtacgtgaaccgaattttatgtggaattctgactttcagagggagtgttattgctgtggagaaggaccttaaagtaagggtttttagactttgggaaccacacactaataaaatttcaatgagaaaattagggttgccaacggagtcaagccagcttcttattttgtcaagacttagatttaaaaagcaccctctcggccaggcatggtggcacacgcctgtaatcccagcactttgggaggctgaggcgggcagatcacttgaggtcaggagttcaagaccagcctagccaacatggtgaaaccccgtctcaactaaaataaataaataaacaaacaaataaatagtaccacctcctattcctattaattcaccaaaggaaaaagatattaataccttgttattagcactggtccgtggacagaaggggatttgaaaggtgctattctgtgttgtggccccaaacctgggctctatacaattgttccatggggagcaatgcaaccacaggttcctgggtccaccccaggcttgctaaatcagaatatttaggggcatggccctgggatctatagctttgtaaatttctcaggtgattctgatagagaactgggtttgggaatcactaccttggatagagcatatatgtttaaagagatacaggaaatactacatttctctaatgctgatttagtagttttgaaatccttgttattttgttcttttggggttttctaaccaatgagtaggttttcaaaggcaaataagaaaacctttatcacagatttggtgacagttgaccccaagaagatcgtggaacccagcccatggaaactacactttagagtatgttaggtaaatatttgcagcgtggatttttctgaaggtgcaggatttctaatgctccggttttcatgttctaggcacttcttgctcggtgacttgttttgttcttatgccttggccaattaaaagctgagatagtgatccctaggagagtatgagatgtaaatgagctgtaaaatggcttcttcctagtgattattcatgggaggcttggaactcgaggtgggttcagtctgtttggaggcttgagctgtgcacttcggctgcctgatgcgaatggcctatggggaaggaaccacatactgattgaaatgttagcaaacagctggcacgctcctgcccactatgcagaggaagcaaaaatatttatctttttttgcatttacagctatgcttgactatagcaggactccaccgtaaatgacattttccccccttccctccagatgtttcagttgtcaacgtgatgttctccttcggttcttggaatttatcagacagattcaactttaccaactgctcatcattaaaagagtaagattttatttgaaatttgaatattctctcgttgatcttaatttacttatttgtttgactcctcgatttcctaaagaactcttttgtgagacagaactttccaaaatgccttttgaagcatggtgtaatgggagataggagagccaccgagctaataagctccgctcgcacattctagccctgactagtaagctggcgctgcgagggagagaaatcccctgtgcttaagtgttcatacccacagggaaatatgtcttcccaggaccgagaggcagccttgaagtaagtaaagaagaagggacaagccaggtgtggtggctcacatctggaatcccagcactttaggaggctgaggtgggcagatcgcttgagcccaggagagtttgagaccagcctgggcaatatagtgagacgccatcgctacaaaaaaacacaaaagttagccaagcatggtggtatgtgcctgtagtcccagctacttgggaggctgaggtgggaggatcacctgagcctaggagatggaggttgcagtgagccgggatggcgccccgcattccagtctgagtgacagagtgagattgtctcaacaaaaagaaggagcgctgctaggttctcttctgattggaatggcttcgggaatttgggcggaacgagaagccttgagtgtaggggtaaaaagtcttacttgagaaggacaaggtgaagtccctttcaccaaaagaacatgttcctgctgccccccttttcaccatctttggcctctttgagctacataggcccctgagttagtgccaaacctcactccttgcttctaaagcagcaagaggacagaggaaatatgtttctcagatgcctgacttgccaattggaagttgggatggaggcctgcagggcaccttgggaggctgcatgagtagcagtgctgtagatcactgcatagtttgattgaccagttatgtgagcaccaaatgggagtttcttttgtcctggcctgggaaccatggtttctatggggaaaatgaatttgaacttgaagctgagctaggaggctgctcttgaatgattagaacaggagcccctgggcctcatctcttccactgaggcactttgaaaaagatgacacaaggcccagttcaattattgctaagaaacagaatggatttaaggagaaaaaaatacaaaaattgctacagaaagcctcagaagttcatgaaaataggaaaaaagggtgtgaattaaatagaattatatagctcaaagacagttgaaagaacgtagctcccccgatgcccactttaaggccagatgaaaggaaccgactagccccaggtcccacaacttggtaattaagaaccagacctcagacctaggtcccccagggagggtgagcgccctttccataggtaactgcttcctgttaggaaagcacttagtacagtaatcacaccctgggggtagaagaagcgagcaaatcacaaacccgtgtctagctcacttaggtggccggatccacgcaaaagccagtgtgtcctctccttccacggaaactgcagtttctgtagatcagaatctcagaatgtttcctcatttcttggagaaggtataaaacaaactgggtcccccggccctgtgctagcaccccttgctagagctaaggcttcctctggcctcccttggccctgtttccagatcaaccctgatttccctttttaacattccttctcataagtgcttttcaagtcctccacagtttacccaatcatgataggtgatttgattagtagaaacacaattcttccttaatttgattataaagcaaacacaggcacctcgttgcctctgcttgccagctaacactttctgtctcacatcttccaggcagttggcagtgtgactgctggagtgagtgagggcttcctgattttggaaggcagagtgggtagaggcggggagagagagagatccatctccagagggacttacctgagggtagacaaatagcagaactggattcagaaacagattcattgggttcctattatctacagaccagcaggtgacccagcttcaggtttccatggcaacacccctgcaggtgccattccggcccatcaacctgagggcttccaagagcagggcacaaagcctcacaggaatgtctgtccagggatttttttttttttttgccttcttttaaatgcttgcatgccacatcacagagggaaattctaggatgtgaacattgtcctaaaacgcaggaattaagtcagttttctgtgttgctagatgcccagcatgcgtagaaactggctgcgcgtggtgtaaaagtgcaagaaggtgtatccaccccttcacagcttgcgacccttctgattatgagagaaaccaggtaaagtgacatttttggtattgtaagtcttaaccgccgggcatggtggctcacgcctgcaatcccagcattttgggaggtcgaggcgggtggatcaattgaggtcaggagttcgagaccagcctgaccaacatggcaaaaccctgcctctactaaaaatacaaagttagtggggtgtggtggcgcatgcctgtaatcccagctactcgggaggctgaggcaggagaatcacttgaacccgggaggcggaggttgcagtgagccgagatcgcgccactgcactcccagcctgggtgacagagtgagactccgtctcaaaaaaaaaaggtttaaccaaaaataaatgtttgtgactgcctggtcctaccttctcttttatgtttgttgcacactttgaatttaccacccatctggatgttgaagggatgttctccattccaggaacagtgtccagtggctgtcgagaagacatcaggaggaggaagacccaaggagaacaaggggaacagaaccaaccaggctttacaggtcagaccctatttttgtgtggttgaggggaaaacctgtctttgaatgaccatgaccacaactcatactactttgggttccttaaaaaaattctctattttactttctaccaaaattcccttttgtgtctttggttttttaaccaagtttcacttaattagcgcaatacatcaatggctggacactcacataaaataaattaaaactctgtaattatgaaaaatgatgttgctctggtcgaaataaaattgtaaaggtgactttgcggctcactggtgaagagctggaaggaagtttagcattccatctgagggatttcaacttgcactttatataattgcgtttctgggggttatgtgtgtggatgggggtctgtgcaaagtgtgcaaactaacctcgattccgttgttttttttcaactttgtagggacgtctaaccagtagtgaacactgctaaaccagaattgttatagaatgtgtatttctctcgccttctcacaagcagttattaatccatgaactttccttggaaatgcccgttattttcttcatagtaaattacataagcccccacgtcagtcatgtttgaaaagaggggacatgtcaacgtaaacatttctgggcggaacacatgtggctgtgcttacaacttcactcagtcaacaaaagttcattgagcatctatatgtggtaaaacacaaaaagaggataagtcctgccctcgctaaccttggagtctagcagaaatagacaaattaaaaatgacagctctggggagaaaagggctccattttccatttctctaatctgtggttttgacttctccacttgctgcttacctaaggtcaagtgcaaaggtaaataagtagcatattttgaatcattactgaaaagtttatagtaacttcaggtgaattaacaaccaggcagagggaatatgaatcaaatggatatgaagttaattaaaggcattagaaaagcttgatgctcaggtatctccagactttagcagtctctgaggtcttgttaagtaatgggctccttttctcatcccattggtttggaaaactaagacacagcgacaaggacttggatcaggaagacagtggctttgtggctttttctttttaattaaactttgttgttgttccagggtttgtttgtttgttttttcgttttgataaaatacacaaacaaaatttaccatttttattgcttttaagtgtacagttagttgaggtaagtacattcacatcattgcacaacctatctccagaactcttttcatcttgcaaaactgaaactctatgctcgttaaataataactcttcatctctccttccccccagcccttggaaaccgccattctaattttttgtctctatgaatttgactactctaggtacctcatgtaattgaatttgtctatttgtgctggcgtctttcacttagcatgatgtcctcaaggttcatctgtgtggtcgcatgggtcagaattcccttcttttctaaggttgactaatattccagtgtatgtatataccatattttgtttatccattcatccatggattaacgcttgggtcgcttccacattttagctatgatgaataatgctactaggaacgtgggtgtgctgctatttcttcgagaccctgctctcagttcttttcggtatatgcccagaagcagaattactggattgtattgtaattctctttttggttttttgaagaaccattgtaccgttttccatagcaacgataccattttgcattcccaccaacagtgcacaagggttccagtttcaccccatcctcaccaatacttgttattttcgattttgtttgatagtagccatcctaatatgggtcaggtggtatctcattgtggttttgatttgcatttccttgatgattaatgatgttgagcatctttgtgtatgcttgctggccatttgtatatcttctctggagaaatgtctaatcaagtcctttgcccatttttaaaattgggttatttttgttgttgttgagttgtaggagttctttatgtattctgggtatcaaccccctatcagatatatcatttgcaaatattttctaccattccataggtttccttttcattccgttgactgtgtcctgtaatacacagagtttttaattttgatgaagtccagttcatttattttttcttttattgcccatgcttttggtgtcagatccaataaatcattgccaaattcaatgtcatgaaactttctttctgcatttatttgtaaaggtctgtagcacttatattttggcctctgattcattctcagttcatttttatatatggcataagaaatgggtctaacttcattcttttgcatgtggatatccagttttcccaacatcatttgttgaaaaaaatgtcctttcccccattgaatggtcttggcaccctcgttgaaaatcatttcaccatatttgtgagagtgtatttctgggtgttcttttctattctattggtctatgcctgtctttatggcagtaacgcactgtttgattactgtagctttgtaaagtaaattttgaaatcaggaaatgtgaattcttcaactttgttcttctttttcaagattgttttagaaaataataaacttttaattttgagataattgtagattcacatgtacttgtgagacaataatacttaatatcttttacccagtttccttcaatagtactatcctgcaaaactatagcaaaacatcacagtcaggatattgacgttgacagcagtcaagacacagaacagctctatcatcacaaggctccccaggttgccctttcacagtcgcatccatttccctcctccctcccattctccatctctgatgcctggcaaccactgacctcagctccatttctataattttatcatttcaataattttatataaacggaatcatccagatgtaccctttgggggactggctcttttaactcaacataattctctggaaattcttccaagttcttttatgtatcaataattcattcctttttatcgctgagtcgtggtccaggcagcggctttttaaacttctttaattttaaagataaatatcataaagtcactacctcctggtttcctgcagtgtatctctctgcaccctttgaactgtgtggttaaaaggactggggtcaccacaagagaagaagaaggctgaaaataaacaaaagcccagatctgtttttagtgcttctctgtggattacccctctaagtgtggagaaagacattttgttgatactgacatgttttctttaaatatgtgactcagagcagaatctctcttttgtttgatagggaatggagtgttatttgtcacaggagggatttctcgtgctctgtcaaacactgctgtctttcattatcaggtggaatgtgtaacattctggtttccactttgggccttcatgttggccttgaacaaagcacccaatgtctttgtgattctgtttctaccagagaagtcactcacagctttgcttcaatgcatctgcccacaccacatatgtactgagtacttcctgtgtgctaggcactaggaatggagcaggtactgtcctaggcgtctaggatcctgaacttgagttgattctttctagaggcatttattgcacacctattagatgcaagtataccgacctccacagattccatgaggaggattcagatgaatcaggcacatctctggccatcagtctcaagaatcttatccatgagtacatgagtaaaaatacaagattttaaaaatattaatatgaaggtacaagaaagtacacagagagcctctctgtgcccggggctttgtcttagtccttcctgtttgcttaaacccagtgccttgaagttgaaaacacttaatcagtgtggttggttaagtctttgattgatggatggattgattgctggagatggcatttcagcccacctttgaggacgagaagcatccagacacatgaatgcgggtatttgaagcagaggaaccagcatatgcacagtgtaggggtaggagccagaagattccaggacacacgctagaggaaaccctaagtaggcacagaggatgcaggaaattatgagacacaaggttgaaatgaccctggagcctgcatatatagggcctcacataccagtcctgtgagtgctcgctttattcttcagtggcaatggaatgccattcaaggtatcttattttatttttttagtgtatgagtttgctaatccaaggatctggtacttatgaggtagggtcctggttcagtccctactaggccagtagccctcacactgtttcatgaccccaagacctactcctgtatcctgaccctgaaacgtatagcgtcatctgccaagggggctgagttacagaaaagtgtgaccacaatagagaaatgagctcaaaaatctatgtatgaccttggaggaggagtatttcaagctataaaggccagtgtctgaccgtctgtctgtttctttccacatatctagtagttgaaaccttgtcagggaccgttggcccttttaccctgccctgaccacttctccttccatttcttaacattctcatatctggtgccttcactcactgagaccagagatagttcccctctcttttgtgcattcaaggagagattgtgaagatttatgatatgatgtcattctaatatttgttattaccctcaatatgcttatcactatagggcagaaataaagcatacaaagtcatatcccctggcaatttacattcaaatggttctttctcttccttgcacctcctcttctcttcctccatcacttcttcccccctccgagatggagtttcactcttgttgcccagggtggagtgcagtggcacaatctcggctcactgcaacctctgcctccccagttcaagtgattctcctgccttggcctcccaagtagctgggattacaggcacccgccaccatgcccagctaattttttccaatttttagtagagacagggtttcaccatgttggccaggatggtctcgaactcctgacctcaagtgatctgcctgcttcagcctcccaaagtgctgggattacaggcatgagccaccgcacccggcccctccatcacttttgaatatgcatttttgatctctcacaggcaatccagatgaatgcttttggggaccttgccttcaagagtgaaattaaatttcacatataccttgctgagtagcttctatgggcctagcatagagccgggtactgtagaattaacttacaatcattcatttattcattcattcaaaatttgtttgctgagcaactactatgtgctagacaggcaggcaaagtgtgtgactgcatggagcttacatggtagaacttataatattttggaggaaataagattcattttcatgaagcagttgcatgtgcacaagagaaaaagatacaagagagaatgccagaatgtactcaaatgaacagtggtagctaagattcgctgagcctgtgccatgccctgagctcagagtatctaagcctcacaatggacctattttccccattttatagataaggaaattttagctcagagagagcaaatggtaggtaagaaatatgaatccaggcaatctgactcaacagagttttaaccattaccctacattgtatgccctaaattgaatataaacattggttaaaccatactactgatgatattaataaaagtcagtctggaaaggactctaatattggcttctcttggcattagactgtcaaagcctgcccccgatccatgccacacatgtagggtgggagcaagacctccaacctggccaggatgtgggaggagtgtattaacctcaaagacatgggagaaaggggtggggcagggtgtggtccgagggaaggagtcagacccagacacggctgggcatctgctccaagacagggagagcagaataggcttagtgaggcaactgaggccctggggagaggggagcagcaagaatctcatgcatgagtcgaatcttggccaaagggtggactttgaggggctgggtttaaattagaatcagggccctccactggctgggaagagctgccctccctggccctggagttttggtcacccagtccaggtctggggagccacactcagaaggctcaaatgccaagaggaatagcaggttgttcggagggtgggcttggcagccaagtcagcctccttttagagtctgcagctcagagaagtgagtcttgatctcttcgcacagggcattggtctgtcaccttctatctggaagtctcaagctctgtgtccagaggcactgctcactattggcatttccagggccaactgaaatcacatctcaagttccctggagcctgtaccgaggggcccccgtgaaaaggcatttgtcccaggggctaagcatcaaatggataaccattttgttccatttcacactctaatttttcttgagtggacctgtattttgctattttctttccatatctcacctccttttactctttcccatttccacggctggttaccactcttaccaatttatacatttcattaatatattagttctatcctcttctcagtcattaataaagatgttaaataatcctgaaccgaatactcactcctgtagggccctacaggactctttcctttaattagttgtgctacctttcatctatctaatgtccttcggtttcagatttccagctggttttgaatccatgtgactttttatctagtcctgtttgaactaatttcatgagtgaaaatccgagagatgttttactgagtgttgattcaggtccaggcctacagagagtttgctatattcagatttttttttaacagattaatagagtacaatttggccttaataaactgagccctcctaatgcacctctttccaatattcttttcaatcatagcagtattttctccattaatgtcatggtaatttgaattgtgttgacgtcagacttcacaaaaggtactcttactgtcagaagtaatcctcttagaccttttgaaagataactatttcttagtggttgtgctatttccaatatcctataatgacttagttaaaaataaaaaataaaaaggatcgggtattctataaatctcctaattaaccagcttctaatgtgctttcttatacaaaacagggactgaaagccagagctcatagtagtttattaaataagttcaaattgtgcagccatttaaaaataaccctgaagtctttaaaacgtaacctacaggaagcacactattctgaggttaattgctggacaacatagggctgtgacggttatagtcaacggtattttgatttgaatacatagaaatccttggacatagagtgagggaggaatcccacgatagggctctaagaatttgtctctttgtattgagctcaattatgttttacaattaactccctctaaaatgcataagcttatagggctggctactatatgccaggttttatgaattaactcttgatgaaaatacaaaaattgatctaaaatattgaatgtgtagaacctttatggggaaatgattctttgctcttttgtctgtactggatttttcaaaatctttattggtaaaaagaaagaatgtatttctaagaattgttgcaaccatacagggcagccatggagctgactctacattttgttttaaaaatgttgttttatacctgcactatttatttaggagggtcctcttggtagctctttaacccatttattaagattagaagaggttccaccagcaaacaaaagacaactaatctgagtctgtttaaaagcagactgaagcacccactttcacaagacaggccagggctggattccatcctagatggccaagagaaccctctctaaacaataggggtttaaaatgtttttgaagtagcaaggcggtctccactcagggaaataaaaagttaataagatgatgtggcaagtcctctgatggtgttcgtagagccatttaaggagcaaaatataacttccttaaaaaatcttttttacattagttgtaaggctctctttatcctctgcagagaatggagaagaagcatttacttggcatgtttgaaaattttgcttgagcagacatcaacagtataaatataagaagcaggaaggactatctagaaagaaaagaaacctgggaatcatagttgacttggatgtaaacgtgagtctgcaatgaggtttacataaaaaaagaaaaaaaattctatcttgctcccctaagaagacagtggactcctctagagcagaggtcggcaaatgttttctacaaagagccaagacagtaaatattttaggctttgcgggccgtatggtctctgctgcagctactccactcgactgctgcagtgcaacagcagccagagacactacccagacgaatatttatgggtgctgaaatttgaatttcatgtgtttttatatgtcatgaaatattattcttcttttgacattttgtcatggcccatacaaaagcaggtagcgggcaggatctggcccacagactatagtttgccaactcctgatctagtgcacacatagatcatgtgtcccccacaatatctggcctaaggaccctgtaggtgctcaataaacacttgttctcttagctgtcaccacgtaagagcgaagagtaagccttttgctatataacacacacttgacatttgcaagagatttatcttgaaggctttgctaatccccccattccaagtaccactctagcagataatttcccccataaaatgcagtcaagtataacagaataattaaagtgaccctttcaggcccttagtgattctattaatacagggctaacgtccttcacaaagtgattaaaataaattctgctaccaaaatcaattctgtgtcatgttacatcattgctgtgatgacattaacaatgaatttacctcaatctgcaaaaccagtccaaagcgctgatgagtgatggggacgactgtgccgtgtagcacctgtgtgtgctggggagcagaatgagaaaatgtctgtttgagcaggatgggcagcccctgtagcccagcaatgccaccccaatgagtgttccatgtacaaaggagcagaggatactcaattgcttcaagaagcaggtgttaggcaggtgttggacatcacggagttctcccagtggctcaggggcttcttcctggactcggtcctccaagtggatgcactcagcatttagaatttcaccaaacgtcatgtgattaagcatctctggactttggggtcattttcaaatatcaagactgagtatattctgcgatggtagaggatataggggaaaaaagagtgtgagtatgatgttcactcttgctgaagttctgctggactttatattgggtagaatcttagaatcttatgtcctgttttggtcaccgtattatagaagaatacagacttgctgaaaatggtctacaaaagaacagtgaaattatcagaatgatagacagtagcatctgtaacataaaagtgaaagaactcaggattgttttatcttgaaaagggaaaatgattcttgctatcaaataaagggctttttttttaaagggagaatttgattagatatcacaaatggagaagtaaggtggcattcacctatatggtatgaagctaggtagcaagggactccaagggacatgttcttgaccttaggcctgataaagtctattgaaactgggtagcaagaaggaggttgtggtatctacaaaccttggttggccacagtggtttagacatccaactacttgatagtaggtgactgaacaggttgatttcttgaggtttttccccctgcagtatcctcctggattcaaatagcctcactgtaacaaaaatatgactgctttcttgggaactgaatttatctggaatgacatttatttcaacttaacgatgagtctgtcattggcctacggtcaatggactctctttcttttccttgattttgcttacattgtgagcctccagaggctgtaaggcagtaaacattttcaaaactctagtgatacctcactcttcagacagaatatcagacttttcaactgtattttcaactgtcttgtgagacaaagactaattggtttgacctcatgctgtcacatgttgagagacatgaatctgcagccctcttccttgaattcattgatttcattaaacactgtctgcttgtgttcgcaaaatgttgtaatttcccagtgatttcttcgaactgcagcgtataaacagatttttttggagcgatgccatttcttagctttgatctcctgttttaatcttttctttccaataggtcttctacattaagtccattgagccacagaaagtatcgacattagggaaaagcaacgtgatagtaacgggagcaaactttacccgggcatcgaacatcacaatgatcctgaaaggaaccagtacctgtgataaggatgtgtgagtcgaaatactaataatttatcctcggtaacgtaacgctcaaacctgtgccaaaggaatatcagtgtgattataaccttaatatagtcaaattattgccatgccccaaagcaggccaattagtcagagtatttgacataatataattccaacacgtaaaataattttcacaacagatctgaagttcattgtgagagaatctgttctgtgttattccccaaaaatctcagtatatagtcatttcaggatgttgcctgtttggggtcttgattcattttcagtaacaaaatcaagtatatggagtagcaaacatcattctttaggtgatgcacttggaaaaatagttgagtaccttgaaatttgatgaggaattttttggagcagctcttccagtgtgccacccaaagttgaaaaaacaaaacctcttggatccattttatgtggacattttattctttgtagccttctctttactggtttggtttcagcctccaaaaattaaattactactacatataatggtagtaaaaaagaacaccccaacataaatatctggtcaatgtatctcttgaacattattatttctgtcacttctttcccaaactcatcacatcggtgaaacttggagaaagacttttcaatttctaccgatgtccttgtgcaaatggttactcccccttcgaaaaaaaaaaagtgatgtgataactgcagttattaaataacacaacagattatttgagttttctgcttgttaactcatataagtttgggctaatttgaagtaaaagatgttacagtctacatagagtataatactaagcttattttcatcatggaaatgcatttaagacaatctgctgaagcgtgatgttttgatttttaactactaaaacagatttgtacagcattctaatctgctatgcttatttactgaattttcttctttaattcattttctgcacatcactgccatgcccttcccctcatagcagtaaatttggaatatctgtgatcttgatgagaaaagctgctcattggtggcttgcctgtgttctgctatttgccagaattatcaagcacacattagaggctgtatctatgcaacataggtttttttgtgctgtttatcctggctaaataccttattgcaaaaatctttcattttatgtagcgaaatctgtgaagttagacacctgtgtattcactgaaaggcaatcaacttcatggaaaataagtagtttttcggagcattaccctgtttctgactctttatgttctcattttaattccgaatgtgtcttgagatactgcagttattaaattaaatgactaggagacctttctgcatgtcgcatttcagtaaccacatctgtgtggtgaagccaagttcacaagcagtcaacataatactcagttaatcctatacctgagcccaggctgtaatcccaagctcttttaatatggtacttttaaaatgggtaattattttaaagagaaaaatactagtagtggaatgacctacattttcacctctcttcttctgaaatttataaacaagtttgaattttaatgttcaaccactttatgataaatttcctagagctttgctctgaatataaacctgaaaatgtgcgtctgaggtggcgtaagtacaaactgactcagatgtttttgaatttgccttatcctaaagggttagtgatagcattaaagttaatcatcatgcacatggcctttaagtagtaataacagattctcatgtagcacggttatactgagcattattcagacacaacccaggcttaatgatttgtgctttagaggatcattgtagacacacagaggaagctgcaggtgacagcgggaatgtcggagaaagcttcgctctgactctgaaagggcgccaagcatcagctgttggacatcaggagcaccctggacagccccagctaagtcccagcctggatactccttagggagcatgttggccccaatgctgattgattctgagatgcctgggctcttggtttaggccccctttgaacagcagaatttccatctctgtctggtgctgtgttttaccctctcagtgcttgactagggctttttttcttaagctttttattatggaaactcaaacataatacaagagagatgagtgtaatgaacctctctgtagccattcccggtttcaaagcctatcaacattttgccaatcttgcttcatctatcttatctgggatttttgggggggcatgataagaaccaaacaccatatccttcactgctaaatacttcagtacctctctaacagataagccatagtgccattatgatactcaacagaattatccacaattcttaacataatgtaacccccagttcatgttctgctttctattagtacttcttcagggcaatggttacacctccttcctttcccacttctaagggcaatgcaaataagaaagataaaaatgtactaaagaaagaggaacccaacccctaataataccaacttgggtcactggcccctcatgagtcagtagttgcctgcagctgttctgctccttcatgaagtgttgtagttcaagtgaaattcatttgctgtcaccttgggtaatcaactgtgctaagtgtctgtgtcatgtgagagttctttttctactcttttctaggatacaggttagccatgtgctaaatgacacccacatgaaattctctcttccatcaagccggaaagaaatgaaggatgtgtgtatccagtttgatggtgggaactgctcttctgtgggatccttatcctacattgctctgccacattgttcccttatatttcctgctaccacctggatcaggtactttctagattcataatctttttctcattgtggttaaaggtcatatgcccaaagatcattgattttattcaagtaaattcagaaacagtggtcattccaaattcctctcaccgagttctccttaggatttactcctagaaaaatgcatacctgacaagacatttgcttcccatgctcatcgtgaatgctatgagcacacctttttcccttcaccatggctgctgagaaactcacagctgaaatgtttgcctaggtttttgatatagatatatgacactctttactatgtgtccctcctgcttgtgataaaaggcttctttcttacctctttcattttatagactttagatactttaagctgttttgaattctttgggggaaatattgggagctatcaaaatgaaaagcagaatcaaccttttcaagatgttccctaagggggagatggaaaccccaaaataaactctcccagataaatccaatatgttaagaaaaacatttatctccctagttgaatttttaaatttattactattatgtattttttgcattttcatgggtacataatacttgtacatgtttatgggacacgtgatgttttttctatgatcatacagtgaatatgtaatcatcaaatcagggtaattggagtatccatcacctcaagcacttatcatttctttctgttaggaacattccaattccactcttctagctatttttaaatatgcaataaattattgtgagttatagacaccctactatgctactgaacactagatcttattctatctcattgtatttttgtagccattaaccaaaccctctttatccctctctggccccgccacaccacccttcccagcctctgatacccataattctactctctatctccattagaccaactttctcagctcccacatatgggtgagaacctgcaatatttgtctttctgtgcctggcttatttcacttaacataatgtcctgcagttccatctgtgttgttgcaaatgacaggatctcattcttttttgtatgctgaataatactccattgtgtataggtaccacattttctttatcctctaatctgttgatggacacttaggttgagtccctatcttggttattgtgaagaatgctgtaataaagattcctcctagttgaatttaaattcactttcataatatttttattcctaaatctctttaggactaaaatcctaacgatattttctttgcctgacacagtacgaagctaattttcaaagtactctctaggtaaacctacagacaaaaagctttgttaaaaaaaaaaaagaagaagaagaagaagaaaaggaggggaagagaaagaggaaaaaaagtagagaagaaaaaaatcacttttaatattcttatttaagatcaagtgagaggtggctatattagtttgctagggtggacataaagtgccacagcgtttgtggcttaaacaacagaaatttctttctccccggttctggaggctgaaatcatggtgttggtaagattggtttctcctgaggcccttacaccttggcttgtagatggtcatcttctctctatgtcttcacgtggtcttccctctgtatctctgtcctaatctccccaattttttttttttttttttttttttttgtgacagtctcactctgtcacccaggctggagtgcagtggcgcaatcttggctcactgcaacctccgcctcccagattcaagtgattctcctgcctcagcctctctagtagctgggataatctcccctttttataaggacatcggtcatgttggattagggcccaccccaatgacttcgtttaaccttccttacctctttaaccacccacgtctctaaatacagtcccattctgaggcactgggagttagggcttcaacatacattttatggggacacattttttggggacacagttcagtccataatagtaagataaggagaactgaaatttcaaaaccaaggctctagcatgacatcccccactctaggaccaattccattctccatataaaaggagacattgatgtggcatgccccatgtgcctggtgtgttcatctattgactaggttaatcctcacaacaaatttatgagatctgctatggcttgtcccttttgcaaatgagggaactgggggaggaaaagggttcaaacaactcaccccagcctcccagacagctggtactaggaggttgggctctgagccacagcagtatcctgctttgctataaagtaagaggctccctactgttctgtcacctgcgacattctgagcctgtgtgtcttggctgctccttggtcactgtgccttgagcaagaatgtggctctaaatgctggccatcgggagatcacgcttggctcggttttctggtaatggctacagactggcatgaggccaactcagcccttccccattgtggctggaggattcagagatcagtgtcttctctctgccctacacaaattgggttgctcaggcccacctcctggtcttgtcatcaggggctcagctggctgttggacctgacgtacccaggctcttgtcccctagaatgagtgtctggtgacctacgtgaacaggggtgcaagggcagacagagctgtggacagctgtttctttcacacccagtgaccgctttgcttatatgcactgagaaacgtgaagttatttggcctggttttagagagatggaatgcagctgttatttatacggcgtaccaaataggaatttacactttgcatgtcatctgtaattctaccttgcccaaagtgtttcctgtctctctaaataacataccattggtaggttaggagtttgattttgaaaattcttagattgaagtctctttatatagattaaacagtaatcaaacaaaattctgtttagtgaaaccttttcaaggtacagctcctgatctgattatatgtggcgatatgacacaaacaaaattcaaattccatcaaagaatctgggcattttcctagaattaaaataggatctgacctgaatttttatatttatgcatcttgaaacccatgaatttgtggctggtatcctgaaaagattcccaaaattgtcctgtatttgaaattaaaattcattaatttgctctcaaacataattgggtttaatattaaacatgaataaattgatagctttgttcataaatgcaaaatgcctgtgtgttagctatgaaacccttattgttgcttttattccttgcagtggtggtcaaaatataaccatgatgggcagaaattttgatgtaattgacaacttaatcatttcacatgaattaaaaggaaacataaatgtaagtctccagctgctttgtaataatagttgttttcaaggatggttctattttcatcacactatgctatgttgggggtattttttgtttctgtgactttggtgttataaacttttacctatgctatcatatattctatccatgctagaatggaaataataagaccttatccttgtagctgagtatttctagttgcagcaatgaggaaagagaaatgaacttggtacgataagacctgacattttctttttatgtgatttgtggcaagtcaccctaatgaggcaatgcttatgaatatgtgtgaaaatgctccgtgaatggttaaggtgtgatataaagaattgcatttctgtgaagagtaggtggtattgttcccattgcacagagagagttgggttcacagaggttagatgacttgccaaggtcccagaaatcttgtcatgtgcttctccttctcttcgacccaatttgttccctaccatctgatgtcaccttctcttacctttcgtctccccacaggagaaatggtaggaggggtctggtttccacctttgcccgattctcccactggtgcctccagatggggatcctctagagcaggggtgtcaaccttttggcttcctgtggccacattggaagaagaattgtcttgggccacacataagatacaccaacactaacgatagctaatgagctaaaaaatggtttgtgcataatttccgtgatatccaccaccacagataagcaaaaaagtcctcacattcaaaaggctggacacggctgctctagatggaagcttctgatgccaagaggggagatgagggatttcacatacaagtcaggcctccaagtgtacttgcacacacttctaaatatccttccccattctttcttcccctttttccctctccttgatgagatatgtgaggtggctgcctctctggggccctgcctgaccacttcctgccaaggctgacacactccctcctcaggagcagtgtgggttcagacccaaattccgggggccgcctgataggccgtccttacagccttgtggtgcacacattcacctgctgacacagttcagagccacttccaagcctcacactgtatctgactccaggcctcatctccatggtgtgaacacctccagttgaatggctcgtatagtttgaccctctgagcagaggcattacctgagtttgtcacggacttgctctccctcctacttgctgttcccaaatcaagttgaattttttgagcacctactgcaggcaaaacattttgctgggtgcagggacaaaagataagtgagatagtcatattgccttcatggaggcaggcagcaaatctacattgggattgaaagttgaggctgggtgtggtggctcacgattataatcccagcactttgggaggccaaggcgggaagactgcttgaggccaggagttcgagaccagcctaggcaacatagtgagacccccatctctataaaataaaaattaaaaaagttgacagcacagagtatcatcaggttctaggtcctctggttccctaactgttcagaaaccctgtgagtccaagaagacaccatttcttttcacattaaagagaaattaaacatgcatgggattaagtacgcctgcagtatggagtggggtgggtggaagcagggaggtgagttcaggtacagaggacagagtcctcgcaggcccgtgctgggaacatcactcaatcctgcttagtgggaacctagagggtgggtctggaatgaccaagagcgatagctgtaaaactgagctggggccacaaaaagcagcgtcagactgaaaactttgcccttaattctgtaggcagcagggagccactgaagatctctgagcaggaagtgacataggtctaggtacactggactcacactggaccgagacaattagtgacaatgaaagcagtcagaaggttaccaatgggaaaagagactatgcagaaagcagtagactagggaaaggggaggattctgacccaaaaggcttcggtgtcctgtcttgagtcctgggaaaccacgagaaaagaagagagtgtccaacccccagcaggggccagctcctgaagtgcttgttgccgctgaatcactctttgttggggaacctcctgcagggcggttattattttggcaatggtgcacagctgagtttggagaggcaggaactgaagaaaggctgggagcccagtgaggatgctcatgccagtgcaggtgtgtctgagacgtccacagtctctctgggctgacagtagctccctttgggctgtggttagcagagcaggtctcaagtgctggggcatcgtgaagctagagatgaccagcttgtctttatagcagtatcgttgaagggagagtgggggtgacatcatgggagtgagagcacagaggaggaagaaaagagcacctaggactggtggcaaagcttcattttaaggaatgacagacagtaggatgggccgtgaaggtggccgagaaggtgctcagaaaccagtgaaaaagagtaaatcgcatggcgcgagtttgtcacgagtatggaactgtagagtcttgaggataatagggttgggtgatcctctcacctgcaatccttctagaaggcatcttcagtaaaaagccagcctgctaggagttaaggctgctgaggcagtagagacagtggttttcatcctgaggacagaaatgtgagcaggagattcagggctatagtttggaaagatgtgaagggaaaggaaggttgtgcttgtccaaatctcagctctttacatcatattttcccaccaattgcctcttcctattgtcttttttatgctctagtatcagggggtggcgggggtgggggaaaaatagtttttcccacctgataaatttctttttatgagttataattgcttttctgtagaatgtttgccatcctcccctaacccaccagcctcctctgcctgtccttctgtacacctaaacaggacaatatatttatgttatgtatttactaactttttaaattttattttttatatatatagagagagacagggtctcactgtgttacccaggctgatctccaactcccgggctcacgtaaccctcctccctccgtttcccacagcgctgggattacaggcgtgagccactacgcccagcctatttatgtgttgttgtttttttttaatcctgtaaatcaggccaccttttttgcattgttttcagttttcatgctcttcatttcatgggagatgcattgttccttttacttttgttttctcctgttttctgttatgcctgaaaacccttgtcctccttgtgtctagtgacttctgctaaggccctgcaggaggttcccccaacaaagggtgattcagctgcaacaagcgcttcaggagctggcccttgctgagagttggacacttttcttttctcgtggtttcccagggctcagacaggctgaccccaaggacacctaagccccttgggtcagaatcttcccctttccctagcctactgctttcagcctagtctcttttcccatggcataaccttccagctgctttcattgtcactcatgatattaatcataatattaactagcatgttttgagtgcttactgtgtgccgggccctgatctaagcatgtataatctcagttaacgtagccctcatttaatgtaatgtagggtgaagtcaatcctgtgagggaggtagttttgctgtctccatattacacatgagaaaacagaagcaccaagaagttaagttgctcaggtcacttagctcttagagatcacagctgggattcgttaacaaagttactaaaacattcttttctttttgtccaggtctctgaatattgtgtggcgacttactgcgggtttttagcccccagtttaaagagttcaaaagtgcgcacgaatgtcactgtgaagctgagagtacaagacacctacttggattgtggaaccctgcagtatcgggaggaccccagattcacggggtatcgggtggaatccgaggtggacacagaactggaagtgaaaattcaagtatgtttcttttctttctgggtgggatgtcaccccgaccccttgactggaaaggtgtgtttatgctcgtgagtttctacatgtgctctgatttctccatcttcattttgttctttacagaaagaaaatgacaacttcaacatttccaaaaaagacattgaaattactctcttccatggggaaaatgggcaattaaattgcagttttgaaaatattactagaaatcaagatcttaccaccatcctttgcaaaattaaaggcatcaagactgcaagcaccattgccaactcttctaagaaagttcgggtaagtgacctggcagtcccacctgctgtctttacctgatttttgtgataattccttggctaaaccagaggccagaatggaatctttcatggatcttcagatcctcactttaaatagaagataaacaaagctggtactgcgagcccaagcaaaatagctccaaaatagctggctgaatccatccctgtgcctgttcgaacgtcaaagcgttggacacaccattgtctataatcctaatgagtcttgatagcttttgttctagccacacatttatacagtaggatcggcaagcaaaatctctagacccattgacaaatgagctgtcactcttttctcaaatgcggaggtgacatgtcttagcagaaacccaaaacaaacaagggcctcttcagcacactctgggtagcattagaatcagatggagaccagataatctctgggtcatgggctgcttccttcaccatgaagtcatactttctgcgattaatcttttcccagatatgtttgggggacggatcactgctatatttatatcccataataaagatgtgagaccactgagaagggaaacacattagaagtcaccctttatagtattcatgccgtatgaggctctgtacagcctatataaattcttcttgatctatcatcataaataattggataaaagacaatgcaaaagaacttcagactggaaggcaacaacaaaaatgtgttcatgtcccactggcaccagttaatagctctgtggccttaggtaaatcacttgagtttcctgagcctctcttagtccatctgtatgataaatggggttaataataagttttatttgtttttttagacagagtctcactttgttacccaggcaggagtacagtggcacgatcttggcttacagcaacctccgcttcccagttttaagcaattctcatgcctcagtcacccaagtagctgggattacaggtgcgcaccaccacacctggctagttttttctatttttagtagagacggagtttcactgtgttgggctggctggtcccaaactccttgcctcaagtgatctgcctgcctcggcctcccaaagtgctggcattacaggtgtgagctaccgcgcccagccaatagtaagttttaagtcaggaataacaactaggctgggagagacaactcaagcctataatgccagcactttgggaagccaaagcaggaggatcacttgagcctctagaagtctgggcaacacagtaagaccctgtctcaaaaaaaaataaggaacaacaactcaactcaccagtgttcccacctttcctgttagttgagaagagcaaatgctaacattcttcatcattcatgacatagctcctgagagcctacgctgtgatggggacagacagagaataaaacagacaaaaacatctgcctttatggaggttccctaaagagacacagcgtgaagaatataaataaaaattgtgttacttggtggcagttgctatggagaaaaaaagcaccagtgtgggggggtgggggggtgggaacaggagcaggtaggggggccatgctgcaggttttgcaacggtgggcagaagaggcctgcttgtgaaagtgacatctgtataaggaggagtgggaacaagccatgggctatctggggtagaacgttctaggcagagggagcagagggagcagaggtcctgaggcaggaggctgcctggcatgtttgaagagcagcaaggaggccagtgtgactggagtggagggagcagagcagaggcttctgaggttagagagttcatggagacaacaggagatgattagaaccttgtggaccatggcaagggcttggcttgtgggctgcagaaggcatgggagagttttgaggagggcgccatgagctgacttattcagatgacgtcatgaatttagtcaggacagcctaccaagaggcactcccaacatcccatttcagagatgaggaaaaagaggactggatgtgcatacctaattcagggttccatagctgagaaacagagcaggtggcagagctggtatggagagcttcagctatccgggtccaaatccatcctccagctactgtgctcagatgcctccacgggggcagcatgagtccaaggatggaaacacgccttaatacttgtatgtacatcagtgaaataattaagcttcatgtagagtttttcccttgacaagtttcacaaaatataacccaaaaaaatgctaaaactggaaaaatccctcagggatgatctgatcagcactgccaatctggtttttgccacagaatgttttattcaaaataggatgccaggtacagtggctcacacctgtaatcccagcagtttgagaggctgaggtgggaggatcgcttgagttcaggagttcgagaccagactgggcaacatagtgagaccccgtctctacaaaaaatttaaaaattagccaggtgtggtggtgtgtaccgtagccccagctacttgggaggctgaggtgggaggatcacttgagcccatgatgagttcaaggctacagtgggctatgatcacaccactgcactccaacctgggcaacagagcaagactttgtctctaaaacaaaaacaaaataagcctgcctgtaaaaatgataaaaattgagtttcttccttagaataaagggcaggcaggggcttcttgcctacaggttactactgcctctttattgccctcactcctgcaacttaaaacccccagagcaaagagggccaaaattaagactctgagggtctagtccagcatgtgtcaactgacatttcaggaaactgaggcacagtgaatattctggatttgcccaaggacacatagctaatctgccacagaaatgagagttgaactcagatatcctacccagctcactgcttctttttgtattgtgaagccattttaggggggaaattatgtaaataaatacagtccccaactcaattgggtctaatgacattctttgtcccatcaggtcaagctgggaaacctggagctctacgtcgagcaggagtcagttccttccacatggtattttctgattgtgctccctgtcttgctagtgattgtcatttttggtaagtgccctgtttaattttgtcagagaaattattccctggggcctctcgccgggcaggcagactttcagctttcaggggctgtttgcttcaattaagtataaatgggtgaaagcccaaatcaaaactttgagaaacgaataataggtacacgctgagggctttctaaacatttcttttggccaggcgtggtggctgatgcctataatcccagcactttgggacactgaggcgggcggatcgccttgaggtcaggagttcaagaccagcctggccaacatggcaaaaccccgtctctactaaaaatacaaaaattagccgggcgtgatggcaggtgcctgtaatcccagctactcaggagactgaggtaggaagaattgcttgaacccgggaggcggaggttgcagtgagccgagatcacaccactgcactccagcctgggtgacagagcaagactccatctcaaaaacaaacaaacaaaaaacaaaatttttttttaaaggatgcttcattaatagaaggctggattacacagatggtatcttgggatttgagggatataatctactttgcttctccattccttcaaattgtggtgacaaatgttcatttatgtaattccccaagaacttctctgggattttgggctcccaggacttggttatttcatcttgaccaccccccaccacccatcaccccagcctcatttcagtcttgattttctgggcagaaccacactttagaagtgtggtcatgcctgggcacagtggcacacacctgtagttccaacactttgggaggccaaggagggaggacggcataagtccaggagtttgaggttacagtgagttatgatcgtgccactgcatgccagcctggacaacagaatgaggccctgtgtctaaaaagtaaatgattttttttaatagaagtgtgatctatgtcatctcttaaagtggtcccgggcccatccacacacagtgagcccatggtggttgctcattggccaaatctggtccaccaatatattttgttttgccgtgtagcattgtctaaaactattaagtagcttataacatttaaaaattagtgattcacatttggaaacgtctcttgaaaatgtgaaagatttggatcattggatcccaaatttccatagcatcagtttattagagctgagtagcagctacgccctagagagagggaatgtgctccctaggttttgaccacagtcgccaccactccatattgtctccacctaggccatttaactcatctatgtacctgatatctgtagccatttcgtttgtgactctggttctgagctgcttgtcatttgaagtctattttctctcatccttctttgaaaaaggaactcttatccaccaacaaatagcactttggctgggcccggtggctcatgcctgtaatcccagcactttgggaggctgaggcgggtggatcacgaggtcagcagatcgagaccatcctgaccaacatggtgaaaccctgtctctactaaaaatacaaaaattagctgagtgtggtggcacgtgcctgtaatcccagctactcaggaggctgaggcaggaaaatcatttgaacccgggagctggaggttgcagtgagccgagatcgtgccactgcactcccgcctggccacagaacaagactccgtctcagaaaaaaaaaaaaaaaaaaaaaaaaaaagcactttgtatttcctgatttaacataggtattgactttctgaaatttgacagctagtacaggcagttgccagtgtctccttctatacactcatttattcactcattcatccctgcatctatttaccttatgttcattgagcacctgttatgttgctgataactgtgcaagtctctggagctagaaaaaaatgagcctttgcgtgcatgagccagtgttgctcaaactgaggcctgaggaacagtggtcccaagtgactgtcctggaaaaaggggttccatggtcaagtaagtttgggaatcactacatcatactccaccctttcttagacatgcacaatgcatgttattaagactgttgactttatgaagtagtccagtgaagagccatatttgtttcctccagcattattggtagcagagcccgtctattatgtaatttcttttttttttttgagaaagggtctcacttttttgcccaggctgagtgcagtggcacgatcacggctcactgcagccttgacctcctgggctcaagtggtcctcccacctcggcctcccaagtagctgggactccaggcatgcaccatcgcacccatctaattttctatttttttgtagagacagaaaaatatctttctctgttgcccaggctgatctcaaacccctagcctcaaggcatgctcccacctcagcctctcaaagagctggaattacagacgtaagcccccgcacctggctgtaatttctataaggaggagaagcttcctagaataacagtggttgattgttgaatacctatacttttttaaacaatacattcttaatgctttttgtgagttacttcttataatcctcccagcatcacagtgagataggcactcttacagagaaggcagccaggcacagagatgctgaggaacttaacccaggtcacatagctagtaaatggcagagcaaggacatgaacccaagcaccaaactgggttggtttatggcctctgcagcacagttagaagcaatatggaggtatgggagttccttgtggctcgctcatcatgtcaccccattagctctatgcaggtttggcccatgtagccaactgtggatctgcggttcctttctacgtttgcagcacaactttatttctccagggatgcttacaaacattcaaaaacaatggaacaatgcaagtggctgcagctgtggggaagaaacttggcttgtttcattacgtttcagccaactgggatctttggttacaagtgaaggttatttgatttagctttcacttgtaaaatgagtaaggttttggtttttttctgctgcattttggcatcttcctcttcagagtgacccctcactgggaaattttcttataagatccagctttttaatgctattttctagtttcattctagctcctgctctctgtccctatctgttttgtttttgtttttgtttttaagaactgtaaagattgctatttgttttcatttttggtttttgagttaccatgtccctctgatgcagcatctctgtctcttagcggccgtgggggtgaccaggcacaaatcgaaggagctgagtcgcaaacagagtcaacaactagaattgctggaaagcgagctccggaaagagatacgtgacggtaggctccaaaattgtgtttgtagaaaaacaagccttttatatttatacttttatttttttacccttacatagagatggccacagtaatgagaactgtttgtataatagaaggcaacggaagggcagggcctgggcctggctttgtgttttatttcagctcttctctgcagccaaccaagtcattatctattgtttcttctttaatgaaaaccaaggtcatactctgtgttagacaaaacagcagaagatcctatccattgtttgttgagttaaaatattgctcttgggattctgttttgcaggctttgctgagctgcagatggataaattggatgtggttgatagttttggaactgttcccttccttgactacaaacattttgctctgagaactttcttccctgaggtaaaagagcattgatcatattccgaaggttgagtcttgaataataatgaaggtgcttgttgctgttgtcaaaacgagtgtttgcttccaaggcagctataatgtgcttggtacaaaaataatggcttaagtttgagcagagcagggaggagggtaattattaattgcattgattagggtataaaacagtgatgggtcactggtgattattctttgcccagtaacaaaaacctaggagggacagaagctcagagtgatgatttttgctttcttttactctcaatgtagaactgaatgtgtagctgggaagtgagctagtttatttaaaaatcaataaattgtgagctagccaatttgttgtgtttatctgcatgacttacattgcagtgactagattattcactattacttctcaattggaaaggaaaaatactactggtcaaaagggaggaaagtagacatggatggaattggagttgaaaacaggcatttttagccatgtagagttcttatggttctctttggtagtttttctttagctggtcagtttgtattgtcctcatttagtagacgtagatgcacgaactgattaattcatttgttctagggctctgaggagtcgtctacttaaccttttgggttgctggtcttacctatgttctcacgcctccattttctcacccactcactcagccttctccatttaccctcccaagtctttggcgaggtacactcatcctgcgtatcatcactgccatgtcctgataccccagctctgccatattgcccttcttttttgcggtatgatgaccacatagaggcccaacctcttaaacacatcaataccaatgatcacatttcaatctagacttctaagcaacggctgaaatctctccaggccaaaggagagtttgtatcaccttaccagaagcttctccggaacaattggccagaagcctagagttcagaaacccagacacatgcagtaagcaatttccagtttctctataatttagaagaggacaccatgatatgtaatgcggggtctggaggttggaatgcctccataaaacacctgccatattttttggtccaagccttagtgttataaatcaagaaggctgtaaataagacttcagctttttgtgctggtgaagtttgtttcctttaacttatcctccaagagtaccgaggcaccgagatctaccatttgccacctcatccatttctatggcagaacaccgcctggggaaaggaattcgattccccgaatcaggatgactgtgtggggcttctgcaaaggttgcatcacgagtcctatttctgagctatctgagatccccattaagaatttaaaagcaataaaataacggagatttttgactatcaacatgaatgctgtgtgggcttttacagttaatgattgcccttgagtgctgaataatctgtggcctgaaaaaagaaatgttcttatcttctaaatttggtaatcaagaacaagatagagtaatgaatgtaaaggaacactgttgcaagttgagtgtttccaaaaaaaaaaaaaaaaaaaagatcccaggaacaatgctaccttattttaggagaagagagatagttgcaaaggaggcaaactgatttaactcagtgttgtgtataatcttgaaaaacaactgggaaagtcataaaaattgaagtcagaagttgtttaaaggagagaacccaggaaaaaacatgcataaatttgtcagaaccctttcaagaagacctaagtcaaaactgattttataataattaagaaaagatagaacagggaaacagatcgtaagaagacaatgccacttaaatgcattccaggctgcagataagtcctggtattaattaggctctttatggattgatcagaagccgaatcctctaggcctggaggttgggggctgtgggggtaggatttgggtgttcagcacctacaaaaaagcaacaggcaaaatccagaggagattgtaggttctcaaaggaggccagggttctttgctctgcctgtcggttttggcttttaaagccttgctttttattttattgactcttctttgctttgcataaagtaggagaagaaataagggtaggcagaggatctaagctgaagaaaagggaaatttgaatgaaaggaggaagcagccttaaaactcagagagccacgggtccaggcgcggtggctcaagcctgtaatcccagcactttgggaggccgaggcgggtggatcacttgaggtcaggagttagggaccagcctggccaacatggtgaaaccccgtctgtactaaaaatacacaattagccaggcatggtggcgtgcacctgtaatcccagctactcgggaggctgaggcagagaattgcttgaacccgagatcaagaccatcctggctaacacagtgaaaccccgtctctactaaaaatacaaaaaaattagccaggcatggtggcgggcgcctgtagtcccagctactcgggaggctgaggcaggagaatggtgtgaacctgggaggcggagcttgcagtgagccgagatagcgccacactgcactccagcctgggcgacagagcgagactctgtctcaaaaaaaataataaataaataaaaagaattgcttgaacctgggaggcggaggttgcagtgagccgagatcacgccactgcactccagcctgggcgacagagggagattccgtctcaaaaaaaaataaagaattgcttgaacccgggaggcagaggttgccgtgagccgagatcgcgccactgcactcctgcccgggcgacagagcaagactccgtctcaaaaaaacaaaacaaacaaaaaaacacacagagagaaccagggcggcacttccgtatttacgattaagaatcaacctgtttctcctgtctatttacatgaagttggttcagcagaaaaatattaagaaccagaaaatgcaaacctagggtctgggggtttttttggtttgtttttttggggcttttttgctttttactaggggaggatatggccaaaatagtttcaggtcttttgcttgggcttgcagatttgaaactatgaagcaaaattctctacagaagaaatttacttcacaagatataaaattagctcaaagtttctattattatcaaaaaagaagaaaaacttgaatgttttgagtttagagtctcattctgtggacttaaagtattgcttaacatacttttaaagtttaaccattgatttttaataagattgatgatacactataaaccctttttatattccagagctacctagcatttagaaaccagtggggtgatagcattgtggtctagtttgctataaattaggaataaaaccagtaatgataactgacacagggcacttactctgcacccattttattttcacactaaacctctgaggtgggaaccattactgtccccatttcagagatgaggcaagtcagacacagagaggttaggtaacacatcccacgtcatgtgaccagtatgtgattaaaaccaggactggaacccaagtagtttggtccagattctatgcttttaactaccccctgtctttcaatatcattgtgtattgaaacagtagatgctacttaggtaagacttgtaaaacttaacaacgtaatttagtctttatctttagaaggtaaattgcttgaagaggggtctgatatttgcataatcttcatcaatgaccccttctttaactcttaaatcacttcttctaaaacgtgggatgataccttcatctaccaaacctggaactaatgccatgataattattattcttagaggctttcggaattcagtggcgtttcttgaaagctgaataattatttattatgtattagagaatacgcagccaccataaacccaggggcgcttcagattagcaaatagtgtctctactttattaaaacggacttgggtattataacaaaaatacactcttcatttcctttggatgttatgaataataaaagtgtctccttcctctcagtcaggtggcttcacccacatcttcactgaagatatgcatgtaagtctctacgttttcatttttagcccagtgactgcctgatgttcatagtgttatcatcatcactatcatctctattattattactttgaatttttattgtgggttttttttggatcatgaattcaatattgaataattcattgtcttggaaaacccattgtgggtctactttctaactttaaacttatatatgattttgtattatactatatatttttttctttttatcagaacagagacgccaacgacaagaatgaaagtctcacagctttggatgccctaatctgtaataaaagctttcttgttactgtcatccacacccttgaaaagcagaagaacttttctgtgaaggacaggtattagtccattctttgatgttttaaaagcctttaagaaaaaatcaggccgggcatggtggctcatggctgtaatcccagcattttgggaggccaaggcaggcaatcacttgaggccaggagttcaagaccagcctgaccaacacagcaaaaccttgtctctacaaaaaaaaaaaaaaagagagagaaatcaaacctgagtcccatattttatttccaaaccactatctgaacttggtatcttgagaacatgcacttttccaaaggctatttgattgggagtttatgcagccttctctccattttagatcataccaccccaacacaatttttttgttgttgttgttggagtctcactctgtggcccaggctgaagtgtgtgatcataggtcactgcagcctcatcctcctgggctcaagctaccctcctgcctcagcctccccaagtagctggaactacaggtgcatgccaccacacccagctaatgttttgttgttgttgtagtagagatggggtcttgctatattgcccaggctggtctcaaactcctgacctcaggtgatctgcctgctttagactcctaaagtgctgggattataggcgtgaaccaccatgcccggcccataaattcttaataaaaaaagcagaagtgttaatttttatttttaaaacatcccgaaactttggaagactcacatcttgttaccactctagtttaaatgctgaaaacacagaaaatgttctagagatagaagtggttagaatctaaacattaaaaaaaaaaaaaaaaaagctcccaacccaacaggccagctccctgccctgccagtgagcttccatggaaactcccatgggtgtccagctaggcctgcagccaatggttcacccagctctctttttcaacaggtgtctgtttgcctccttcctaaccattgcactgcaaaccaagctggtctacctgaccagcatcctagaggtgctgaccagggacttgatggaacagtgtagtaacatgcagccgaaactcatgctgagacgcacggagtccgtcgtcgaaaaactcctcacaaactggatgtccgtctgcctttctggatttctccgggtaagtgtcacatccctcagcaatgtcagaggtaagacaataggcagttatttttagcggactctgatgcctttgccaggataaatcctgaatgctcgatggtgtcagcacttaaccatgtttcgtcttggtcctgacccagaacagagagagggaaagtaaacattgtttttgctgcaactggcctatgcaaatgtaattcatttagaatttcgtcaggtgagacttttcaggtgagtttaccttctcacgtcaattcacacccagagcccagtcagcccatttaagaaaatgtactgagaaaagggaatatttcaaacaccagagaacaaactgtttcaggccctctgaagcattgtagaaatacccgttgcctaccaatatgctgtaagctaattgcagtcaattcctaccagtcattccgcattaaagcagctctccaaagagctgcctccccctggagtttgctttgttggagttactgtgtgcatgtggttgtcactaattgaactttaaaatcttttcaaatgcaaactttctatagattccagtggagaagagggtgggccctaaagtctgctacttgatctgaatctagacttcaccacttacttggttttataaactagagaattggaagaagattttaggactattttgaagtacagatgagaaaacataggcaattgcttagccctaaggaagcctccataaatgttggccgttacgattataaaatattaatgtgaaaataagggtgtcctgttgaactcgatcttcacccagccctctgaggcccctggtacagaagattcttatcctttaattttaccagccatccagatttcagcaaaactgcataattgtgtatttgtagctagttccgaaatctaattaaactttgaataagatacactgctatgccacaggttttaacagtgctacttaagtttagatccaacagcagtgctttaaatagactgtgcttagtttaatgtttaatgcaatcttacaagtagatgcacaacaattttttttttaatttctcaccaacccctccctctccctaaggcaatacccatttattaagattaatgaaatctgccttcttttctgtttacttggtataaatcatcggaggctttggggagatgttgagccagttatttctgggacgaatatttttttgtttcccactgtctttgctttagccacaacagctgctagatggaggcaccaggactctcacccagttccctggtcttggtcttcaaaggccaactcctgccccaccacagtctcactggatcagaagctccggaagtggagcccagtaatccatgattttcacaagtccctgggatagtagagagagcaccacactaggggtcttggttagaagcagcaggtctgggctctggaaccatctcagccccggtcagctgtgtgtccctgggcatggctttttccatctgggcatctgttttcaatccaccaaatgacaggcgtgtgtgggcgttgcctttaaatccctttccagctctttctactggatcttgtgattcttaactctgagctttcaagggctgctcttgggcattagaggggtgagatgttcagaaaatctgggctgcgagcccaaacagcctccttgagcaaagcattctgggtcaagacttcacagtgctgattcaagagcgtctcgagcactctgagtggtgagggggcggctcggctcgccaggaggaagtggcatccagccagtcggcgatactttcactttcagtggaataattcccgctggtgcaggggtctgatgtccctccaccaggtgctcaagggggtctgggacaccgacagccctagtcctcctgtcctaccccacagacgtttagtgggtgacagtagctccgtgaccgccaggtaactttcccttccaagacaccaaggatttgtgggtaaaataataataccatttattgaatgtgccagacagcatgctaagagctttacctatcttttctcatttcatccccttaagggtcctgtgagctaagtgtcttcatgaccattttgtatatgggggaactggaacacagaagagctgtgactctccccagatctcactgctactgtgggacagcaccagggtccgagagctcttagccaccgccctgtgccctgaaaagatggaatctgccctggtctgttaaagtgtcgaagcctggcccctgggggaggggaatcacgtacgcagcggctgtggctcgcctaaaagttgtgtttagtggtgacagagaaacctcatggccctgtgattccccaaatcagccacacatcagaatcctcctcccccaccgcctccccgcccccggccccgggaaggtaatgaaaactacagatacccaggcctcattcttcagagagatggcagctctgtaggtctagagtggagctcaggcatctgaatgcttaacaagagcccgcaagggattctggtgattagccagggttagacccaggagcatgggcagagtgtagggccagatgttacttagctcagtctagctactctccagaaagttctggagaattcctgaccacaggcctcctgagtcaagacctgtcccttcacacagcccccgagagcccacctggccccctgactccaacccctgcgggagtacacagcccctatccaagggttctcagcctcccttctgatctgtgctggaggaaaagaggttctaagttttgtggtcagggcattacttggggtgggggaggtgggcggtggagggaaagagaagagaagggtgaggttgtaaaccactaaataaaggaagtttctcatgagaattaaatgtcatgcactagtcctgctgccctccctaccttggaaatttctgaacttccacttctgccctgcactgaagaggagactcaaggaggtatcacagcagggatagaagctgcagggtggcaggaggtggcaagaggaagcccggggactggggagggcagatattcctgcagcaagtataaaggaagggacagggttggggtgggatgctgagagacttaagatgtcttaggtaacttgcctgcgcaagggaaagcaggtgagacccagtggaatcctcctttcccagctggacgtatcgcttgtcaagcttgactcttaactggcgcttcgagccccagccacgtggctggcctttcgtcatcactaaggcactttgacttcccagccacggttcttcctccaccacagaggcctaatgtccattgattacggaaggttcgttatttagcaaatactctacagctgacccagggctaagtgccttgggaggatgccgtggaaacagaacacaccgcctcccacttgaggtgctcagagtcctttggaatgcagacatccgtgtctgcgaatgtgagccatttccatcacagcaggggaggcagccccacccccagccaggaaaaatgcatgtggcttaaatttgtagaaagagccaatcgggatgggccgagtgtttggagaaaaaccttagaggaaatggaattggctctggttcagggaagaagatggagtccctctggcccagcaccggaaaacatgtccaggtgggactgtgcagtgtgtgtctgggaactgcccgggccgggcctggcctggcccatggagaggagataaggctgcaaactgttgaacggcaggctgcttccttcgagaagtgctgttaacaccaaaaaacattgtatttggcaaatgtataaaatgttcttacatttatccttgttactaaggatacttgtgcatttttttaaatgtcgtttatttctggcttgctaaagggtgattaaatacgaatgtaaacaaaggtacactctccacatctaactgttcctaggcattaacccactgatgagcattagtctgccatatgtaagtttaaacataaaataacaaggtatactgtgggtactgcacgtcgctgtgaatgtgcacgcgtgcgcgtgtgcagatgtgcattcgcgatggagagaggaggcggttttctgagttttgcatccaatcccaagtggagcaacgtgtattttcttgggcgtttcatgttgagtgttagaaaaccctgtctcctgccttactgctgtaaacagaaactttaattctttggaaagtacagtggattccacagaaagctaactgtcacttttgtgtcttttccaaggagactgtcggagagcccttctatttgctggtgacgactctgaaccagaaaattaacaagggtcccgtggatgtaatcacttgcaaagccctgtacacacttaatgaagactggctgttgtggcaggttccggaattcagtactgtggtatgttttcaataaagctcccagccagactcccaaataaatctggcggggaattagagggtgaggtgggtcatttacaatgaaacggtatcatctctactgcgggaggccctgtgtgtttagttaattaaaaacagtagttgataaaactgttaacacgtgttcacataatagattttaattactgagattgggggagaaaatattgtaatgatgcctggggtactcatcaatttccaaagattttaatatcaggattgcttataactttcagtgtcgtcaaaggaaatgcaaagtactccctattcagcacttataattgcaatcagaatttctcaaatggctctgctctgggaagacaatgtgtgaagatatatttcaatcaaattgaggccgtcttattttagaatgataacacaagacaaattccaccacgttccccatgcaacgtgacgccctttattttcatggattagttacaaatgtttggtgtcatgcacttaatgtactgtgatctcatagatatttttagaggaacgctgtaaatcactacaggaagatgattgcctagctgctggagggtttcacccgcttgagaacttctttctaattcatccccaccgcacccaccccatgctcttcctaaagaaagaaagaaagcccagtttggggcacatttgggaatttcagagagggagccaagcagggaaggtaactttagaattaggaattttctatgcttttctgttagtagagacttggagaagagattgctgtgttttggtttgatctttagctttatgaagattctgggcttcttcacgatctcgttagtggaggaggaaaagattacagtggggtttgggaattgctcattaagagagctgagtcttctgtggctttgctctggatggtggggactgcagtgtcatctgggaagaattcattccctaattggagaaggcaccactttgccgtggagcgtgttatggttatgtcctctggtgggagaatagtccgtaggtcagctgtttcaagttttctgccactgccagatgcggctcacttctccatcaaagatggcaccatgcacagctgccatccgagagcgggaagctgagctgaaagtcaacacttctcagcgttctgaattgtatcaatacacccatccacatctgagaggccggagagtgggctgcattggttctcaaacttgagcatctagcagaatcgcccagaaagctcactaaacaccagtcgctaggcagcatgctggagtttccgatgcagtaaatccaggctgtggcctgagaattcacttccctaaccagcttcctgatgctgcgggtgctgcttaacaactgttggtagagtggttaacagcatggactctggggccagacattttggaatcctgcctctgccactggttagctgtgtaatgttgggcaagtttctaaacctctctatgcctcattctcctcacatgtgaaatggaaatgatggtcatggttcctacccatctcatgaggtgttttgaggattaagagtcagtattataaaaagcacttagaacattgccaggcatgtgagtgctacctaaaactttattccatttgatccagatctcattgaacccttgtttaaaatgcaggtgcaaatataccagtgcccgggctttccctcgggactgactgaatcagaatctctggggagggagcccaggcgtggatgtattttgtaaaccttccagatatctctgatgtgtgttcagcctggacaccactgggtatcttggagaacaagagacaaactttgcacagggcctgttgactcacctttcgctgatcctgggcttgttattcctaacctagaagatgttcatgcctttactttaagacgttttagaagccccaaaggtctccaaagagaaatatttgcaaatgattatagtcgggaatcctccagcatttcagtcatgagacaacaccggacccaaacaggaaagacaggaaaggagaagatgggttggaatcaggaagaggtcagatgtctgaggcaacttttgaggttttgaagcctttttaatgctttacatctgaacgtgttttctccctttcatttcgaaacattatttatttcacagtcaattaagaccatgtgtttctgatttgttaacactcgactcatcatcataatgttacttgatgctgaaggaattcatgtcgactcttgaaatttttttttctttatagcccctggggaaaagggtaatggaaaatcatgatttcagaaatccacataaatcttccttttcaaattcagatttgccggtacataagatttgagccttgaaaaggaatgggccacttgtttttaggggccttgcctttaaaaatgattgttagtgcctcttatggggcctggcccagcccccctttcatggttggcagttgtacgagaagctgcagagaaggcacatgatccgttctatgcttgtgtgacaaactgttagcagaaggtcaatataaaaaatttaagtttttcatttcctttcaggcatttcccccagcctgaaccaccatatttctaattttctttcttcctcccttccctcctccccttctttttcacttcccccacctacccctcccaagcatgtacacccagccattttaggacttgatttcccaaatttgcctgaggtggtttatgtaattgaaaaccaaggtgcggtgaacaaactgattctgtgtgtccttgtgtgctggggaggtgggaggttgggggcagattctttcaaggaaaggaaagtcggaaatcaagagcatcctcacgaaccacttgaaatgacagaacctggtgccaaggcagggacacgtttggaaaaaaggcccccacactcgtgttcagctaaatgctcagaagcacagcacctcatatagcaatctaaaagttagctttcacacctctcagatgaggatgtgttctccctgaggtgtgggggattttctagaacataaaggcatcttgccaatttcttatacatgaaatcatgacactaacaaagaggccctgggaagtaatgttctcttcttgcatattgagaagaaaattcctctgtcttgccaaaaatccaagcaaagtcccctagagccatacttcctccaggaccataagaaaccatccttctctatcaagcattccaggctggtgtttaatgaggcaacagtgagacagaatgccctgatatctgcatcctccctaatgtcagcaccaggggtagggctgtgcacacacaggactttagtctttccttaatatctaggaattcagatcagacagctggaagagaataagaccttttttttttttttttttttttttaatttaaggaataccactctagtgcaggctggagtgcagtggcgcagtcttggctcactgcaacctccgcctctggggttcaagcgattctcctgcctcagcctcccaaatacctgggattataggcacctgccatcatgccaggctaatgcttgtatttttagtagaaacgggttttcgccgtgttggctagcctggtcttgaactcctggcctcaagtgatccacctgccttgtcctcccgaagtgctgggattacaggtgtgagcaactgcatccggccgataataagacctattgctctgctgggtttttttcccctttgcaaaattttgaacatgtttgattttgttgatggagtatctcagactcactcagcttacgttttgtcaagagtggaactttggaggagttagtgaaagtttgaggatttcacatgggagaagggacatttgcttcactttcaggaagagatgagaaaaaccaataactcgtagcaagcgtgctgaattagcaagagaaggttgacttgtaatcaaagttaagtgtgaaatggttttttgaactcttagaaaacgagcttgccaatctgctgtatctgagagagagcatcttggcaccctggaaaactgttccgacaaaaatattattgccttcattctcctatctataagaaagttttcaagattattagaaattcttgaaaaagcacaagtacatgcctgcagaaatattaatgcctccaatttgatttattgaaggtttatgccagcctaccccagtctgtctctttctctagcagttaccattttgggacaattacgtttaataaaatatctcatatacaacagagccctaggtgtctccaccaggagtttcttactagtatacttcctttaacagtgctctgcctaccagtgctggctgcttctgttccatttagtttgtccttgcagaagatccattagccccgtaattaaacaacccactgtcccgattaagtcattctctgttacttcaattacattccattgttcattaaatcctgatgtttgcacttcagcaatcttgtttttaatactcctaccatttgtggagaaacagtgaagttaattaacaattcttgagctttttatttttctctctaccatagtgcaaatcatttccattatgacttgcaatagtactgaaaccattactaacttcatagttagtgttctgagcttcctgatcaaagagtgaaaccactttttacaatcattttaggtaagtcattccctcgttgatggcaagtcatggaaaatgaaaaattaacatgtaatgggtgctttaaatgactttcctcttcatacactttcttctcatgcctgtaatcttggaattagaaaataatttagttatctaaatataaaagtatttactttttttctttatagctcaaatgtgactctattatgttattgttaggatcattatttatatttgtacccctcagagaatggtaaattttatcacaagtcatggcggagatagaaagcattttccagatttgtcttgttgctattgtcaaagttagcattccatttgaaggtactgttatctagagcagggaccagcaaacaacagcctgtgggccaaatgtggcccctctgcctatttttataaagttctattggaacacctgttcatttccttattgtctatagctgctttcctgctacagtgcagagtggagtagttgtcacagagatcatatgagttttaagtcttaaatactttctggccctttgcagaaagtttgttggcctttaatctagagcttgacatagtagagaataggaaccagaatcctccctcccacaaacccacaaacaggttggcctctttcctccccttctgggacacagcaatggaaatgccttgccactatttacaagtctgaaactcatggggctctttgccaacacacaacacccacccccacccccaaccctgcacccgcaaatactgtgaatactaaaatcagttatcttgggctaaatcagacagctcttcatacttgattctaggatggacaaaacgttagcaaatgctagcaagtatagaaaaattggtgagagaaacctaaatttgagaaaattatctccattacttttttttttttttaaatggaaaaaggctctcgttaccctgtcctccaccccttactcttctgttagagtagcagatcccttgatccaggaagctgtgatttatggatctttgtggggaaaggaaaaggggagcagagtgaagaggggaggctggatgggcaagcgcagctcaaaggggaacgtcaggcagaatgtcccagggctgctgactctggcttggaaagaagcttagatcagaagtttccctcagacttgcacttctaactggcctcatgctgcttctacggaacttctgaaactgaattttctttcttgtttcttctctctttaattcaggttggtataagaactaggcttttctcttgactttcattcggccctgaaataaaattagaaatatattttataggttttatttaatgaaagcaattattgctccaaggccttttatgataaagttgccagtttgtaataaattatcttacagttactttctaggcattataaggtatcacagaaaggaggcagcaacgttcctgcttttattagccaagaatatggttgaggagacagtgaggtagccagatcatcttcccatgtgggaaaagacctgttcccctgcccttgattcatcctgccagccccctgcagccttatcctctctgcctcctcaatacccaaaaccaccaaatcatgtgacgggacgatgggtaaaaccggtagtgaaaggggaatgcagttacatgttcccaggccgtgtgcagaagaggtggggtttggagtctgatagtcttgggtttgaatctgggctcagccactttactctgggcaagtctctcaacctctcaaaacctgtttcctcttctgtaaacaggcaatgaccaaaacctgccctcgcatatttgtggtgaggtcagaaaataatacatgtaccacgtctagccatctttcctggtgtgaagtaggtgctcattcttttttgattcagttttccttgtctgaggtgtgcttttctcttgtctcctgtaagcttcactaagcagaaagtgtcccgtcagtattctttttggttggttatttattgatgatgtgggatgtgggggagttgattagctgattccatcatcatgaaaagcatttcttgggtgcctgtgtgcttatgttcttgttaaaaatgttacatatgaccgctgtgatggggtgtttacaacctgtggcagacagtatcccattgggcagatgtgaacaggagacgaccgtgataacctgtgagaggctgatggctgacatgctacaaaggggccaggcctttccagcctggccctcttcccgggccttctggaccatacattttccaatagtcttttctttctcataaccctccttggtaataggcatcattcccaaatcaatcaggatgcagttcagttgtacagaacagagacccaagatgtctgtggcttcagcaacagagaagctgagttctctccctggtggcattctgggtgggcagtgcagggctggtagagcagctgctcctctcttgtcctcatattctaagtgtctgctcaccccagcctcattccccatcccagccagcaggatgtaagcagggctgtagaaaggagggcagatggtcaccagccatcttttaaggaagtgccacataacatatccacttaatgtcatcggccaggacttagtcataaccagaacatgtcctgactctgagctgcgaagccaagaggccagctctgggtcaccatctcccagtgcctcctggccctgccatcctagtcacaagatggctgccaccgctccaagcactactctcccttttgttcggatcgaagacttcccactgggcatggtggctcacacctgtaatcccagcactttggaggccaaggtgggaggatcatttgagcccactgaatctggagcatactggccacacctggcagcagcagaggctgggaaatgtcacctttattctgggtgaacagaagctctgtaaaaatgtccttgggtggcaccggaggcacagggtgctccagattcagtgggttctgtggggttcaatatcaagctggggtgaggaggtcaagcctcctctaccagatcgcctatgtccagcctgtctcctgggagggcattcattgaggccttcaagcagaggggaactgcccttgggaggctcatcaccttggctggcctcttcgcttcgcagcccagagtcaggacacgtcctagttatgactcccaccggctccatgattttggacatgcttctaaatctctctggtctcggtttcctcatccattaaatgaggctaataatggcacctacttcatagagcagttgtgaggattgaatgaacctataattgcattcccagtacgtgataagcactcaataaatgctggtccttattattacaaatctagaaccatattcttttctttaccatatttttttcctatgaatagtacagggactctctttcaggtggcaggaggtggttttgggaggcaggcctgggctacaagtcctccacccatacttccacccaaagaaggtgggatttttttctgtagacttcctgacctgatagcctgagtgagtgattgaagcttcctgctcaccagtctaattagagactggaagccaagtgtctccatggtctaggggcctccctcatgaactacagctctttgcgacccaattcaaatgctgcctcctccatgcagccttccttgatttctctgtttgaaaaccccctgccgacctaaaagaggtacctctctaaatccctaaaatgctccgtctgtacctcccacattctacctggcattagaatgtgttgtatatgccccacagttcttctactagtctgctagtacttcccaagcaggatgagtacaggttctgatttgtatcacctacagtgccctgcacacaataggtgcaaagtaaatggtcatcaatagacgaatctacctcagcatccacaaaatgagctctggcagtttggcacatgcagctataagtaagagaaaattgaactaaggatgcctgaaatagtaagagcatgacttgcctcttagagcagaaagtctggagggaaggagctccaagccggtccctacattccgtggtgtcagagctctgcgtcaccatctcccagtacctcctggccctgccatcctagtcacaagatggctgccaccgctccaagcgctactcccccttttgtttggatagaagacttccaacagggtgtggtggctcacacctgtaatcccagcactttgggaagccaaggtgggaggatcacttgagctcaggagttcaagactagcctgggcaacacagcaagaccctgtctctaaaaaaaaaaaaaaaaaaaaaaaaaaaaaaaatttagccaagcatggcagtgtgcacctgtagtctctgctatgtgggaggctgaggtgggaggattgcctgagcctgggaggtcgaggctgcagtaagccatgatcactgcacttcagcctgggcaacagagtgagaccctgtctattaaaaaagaaagaaagaaaacccttggttttatgtgttggccagagctgggttacatgaccagtccctggtgaaagagaagggagttgctgctgatcatgcctcccaacccaggctggacccactgctgtgcagacctggcctttgttagcagaggagggatggctgctggttggacgacaaaccagatctgccaccgcagcttactgacactttcctgccaaggaaataggaagaggcagggcagtccctctaaacagagggcagatttctggggaagggaccagtgtacatttcacagctctttagcctttcatgggtattttctgggtattatgccatcccatcgatttggaccatgcttactttacaaaacattcttgtacttccaaaggcaggatcaccgagtgtttaagaacacggagcttgagtacccggttctaccatcttcttgctggctgaccttgtgccatttatttaacctctctgtgcctcagtttctcatctgccacaaggggatgagtaaaagaatctacctcacagggttgtttctgagatttacatatacaaatacacacacgtcatttaaaacagtgtctggcacctataaagcactccttaatttgctattattatgtgtcattatttagtgatcctgtcactcctttgagataggaacagtgaggattttaaggctcagcgaagttagacgacttccctacattccctcagctggtgagcagcagagaatgggagggtccaggtggcccggtgctgggcctggaactcagggccctgacccccactgtcctccctactcagaatcctctgtggacacttgctgagggtgatagtcactgatgggtgactgttgtcccacagatgatgcttttgtctctgaaatttatcatgaattatctgagaacaaggactatgtcataacatctctctgacatcccagccctaatactaaatagggcaggagaacatgctggttaaatgggctttggtgggagtgtgggagccggagagatggcgcttccatcgaggtgtctcccccgatggggtacagtggctgagggcagacgctgtgatgtcacgctgtctgacatggcacaggcatctgctccccatcacagagcagaggcccgcgtgcactttcccagcctgggggtggaggtgttaagaggctgaccccaagggccttgactgtacttacgccttaagaaactgctgtttggccgggcgcggtggctcacgcctgtaatcccagcactttgggaggccgaggcgggcggatcacgaggtcaggagatcgagaccatcccggctaaaacggtgaaaccccgtctctactaaaaaaatacaaaaaattagccgggcgtagtggcgggcgcctgtagtcccagctacttgggaggctgaggcaggagaatggcgtgaacccgggaggcggagcttgcagtgagccgagatcccgccactgcactccagcctgggcgacagagcgagactccgtctcaaaaaaaaaaaaaaaaaaaaaaaaaaagaaactgctgtttgagcactaagtgttagcagcatgaaaaatgaacacatatcaatttatgtctgaatttactctcagaattccctgtggactctgtaaaatgccattttacctcttttccacccatccagctgtggaggcagtggcagatttacattattttacatccagttaagggtgttttttcttttggttatgtttttaaaaagaacatttattgcccataaaaaagtgtttttgttaaagacaatagtgcctttaggtagtaatagaatgctgtttcacaaatatttataaaactattaaacaagctgagattgctgaagctccgattaaaaggtgcctcccattcatctttccctttagaaactgaagtagcttaactgcaattacccgccaccatgagaagatcaccttgcagagaaataaggcaagaccccaacaagatcgtaggtggtggcaccagcattgaccccttcacacccacccctcccactggtgtggggaatttagcttaggacattgcttacagcctgagctaagccagggtttctggagggtcaggagggctcctgggctataggtggaaccagaaggagggagggagggcgggtggtaaagcggggatggcatagccgaggggtttgtggcaccaattgtgcagttaggcaaatctggcttcaattcctggttctgccactggtgagctgttcctggagcaagttactcagcccctctgtgcctcagttccctcactctacaacagggatgggaataataatccaggaaacatttctagaaaagggaggtgaggagagggctcgggtgtgaggcttcacatgttggttccttctaggcactctgcccaccagctccctgccttctctcctgtctggtattttttgtttcttgtttgtgagcagacaggcctttgaaccccttcctagtcggtggctggcccagaacataaaggttctctgagagcaggcaagggagtgactctgttgtaggagggaaactcgtacaggccagacggagatcaccggcttacctcagagttcagattccactgattcggagttttaatcatttggttgagaccagaacaaaatttactcttgcgtaattatcaacaggattataagggcaagatttagtggtgtttgtctcagctctttataaacaccataaactgggtggcttataaataatagaaacttatttctcacagttctggaggatgagaagtccaagatcaagagttggtgtcctgtgagagccccctttctcatgatggcgccttcctgctgggtcctcacatggtggaaagggcagggcagctctctgaggcctcttttataagggcactaatcccatttatgaggactctgccctcatgatctaatcccctccaaaggccccacctccaagtaccatcaccttgggggttaggatttcaatacctggagttagggggacatcaatattcagatcatagcagcattaaagacaagaaacacccctgagaacctcccgaaatttcagaagccccacatccacgtcagtggtccataagtcacgggctcacatgccagatgctgttctaagaactgtgcggttactgttgttatgccctctttgcagatgagaaagcgacatacacagaggttacacagctggttagggatgggttcagaggtcacccagctggcttgcggtggactgggatgaaagccaggagtctactggcttccactgggttcattgctggcagcctcctccttattcagagatactgagcatggagtgggcgtcctagctgtccaatgtgggctgaatctgtttgcaaatgagtggatactaatgccaacaatagtaattgtacaggttttattgccgatactatcatcaagcctttcccagcagcctggccccgtgctaagcccttgaatgcatgatcacatttaatctccctaacaatgctagaaggccggtactgttattacacccatttttaagttgaggtaggcctgagggttcccatcttccatatgatttgtgttttcatctctcccctgagccctaggcaaatcagacattgcctcctgcagcctctgcatatatacctggctagtgtccacagtacttggggacctcctctttcggctttggagccccccctccctctgtctctgtatgggcgagcatcttccttctgtcttctcccttccttcttgcctgttagactctccgctccttaaaaccaaaaaaaacaaaacaaaattcccattacttgatcattttacattccctcgttaagccaggctcaaaacattaaataattgtgcatttcacaccatacccaagcctttctgactttgtgattaccaaggtgcattagaatctaaactgctatgttatgctatttgcaaaatactcttggctcttccctgaatcaattcccgtgagggtacgtatcaggtaaaactttgttgttttagatctatttgttcttagacaaagtaaacttggaattgcttttcagtttgttttgaaatattccctagttctgtgttttcacacgtgcacaaaggccttacttcccccattagtctgattctgaagttttgctgcactaggagaatgttcactgacaaaatgttaagtaatggtgctgaaatgtaaagtaattaatgcaagaatcatagtatggggtggggatctcagtgctttaatgagggctggggaaaccatctgactgaggatgttgaaagcggaggggtagatgaatgttcctgtaattaatgctgcatattaaaaaagtgacctctttgggccgggcacagtggctcacgcctgtaatcctagcactttgggaggctgaggtgggcagatcacaaggtcaggactttgagaccagcctggccaacatggtgaaaccccgtctctactaaaaaaatacaaaaattagccaggcatggtggcatgtgcctgtaatcccagctacttgggaggctgaggcaggagaattgcttgaacccaggaggcggaggttgcagtgagccaagatagcaccattgaactccagcctgggtgacagagcaagactccatctcaaaaaaaaaagtgacctctggcatggtcaatatggggacctcgtaaccttccctgtcacctagaactgcacttctgggactctgtggtcctattaataaaaaagataatcaccagtctgcctcatctactgtggaacccttccaattcttttttttctttttcttttgaggagaaattagaaatcaccaaattaccatttttagactatttatgtgtatatgtatattttactctcagatatatttattcaatgcttgctctataatgagagttttaactttctgttttcccttccattatccctgaaaagaatggattatggagaaaagatgaaagtagtctaatgcaatacagtgtttgctaatgtgctgtcagaggtattagtgggacttgctaaggtttgtgtcttttatgaaatgcctttcagattgcaattatctaatagacttggaaacctgtttgtactcttgcaggcattaaacgtcgtctttgaaaaaatcccggaaaacgagagtgcagatgtctgtcggaatatttcagtcaatgttctcgactgtgacaccattggccaagccaaagaaaagattttccaagcattcttaagcaaaaatggctctccttatggacttcagcttaatgaaattggtcttggtaaggcggtgcgggagctatgtggtcccaggccctgatgagtgtccctccctgcctgccctccctccctgtcccccctccctgcccccaccagcttccattcagtgacacttacacagccaggttgttcctggagggcatgtctaggggccaagagactgctttggtctctcatgggcatcctgattcttcgaaggaagcacggtccttcaaagatggcgtttgttgttgttgtctttaaatattacgtctgtaaatcagattgatgagattgcaggccctgagactgcacggaatcaccttgcatcatgaaatacagaaaggtgtcaacacagtgccctctgcgtgtgttgcatttcacattggcatttgatttgtttgttgtgatactgagcgtgtcattactgggtggctcagactctgggtgttaactctagcctgctagaaaggtcatcttcctctgctaatcacatcctgtattaagtatatgctccgtcctccctcagtgtgcagcagcatctgctatgaattcattttcgggctctactggtatactgcaaaggagagcatatgcgtgagcaagctaacagggccccacttccctcaaatgttcatcaacattttaaagttgagctccgtgcagtcctcccaggagactgtcgtgggattttatagcagataatgggacagaaatgaagaatagaatcatggtggtgacagacagtgtaacgaggttcacttccccttgatgtacagttataggccttgactaagcaggcaattaaaatcctcccactcggccctcccagtccagccccctgctaaaaggccattgataaagccttgaggcagggtcttggaagtttgagaccatgcaaatgtggggcaacttggtgatgtggctttaaagaaagcagggctgctaaggcacccctcttctgcttccttccttgggtgaccgttgagtcacttgaggaccattttagctcatttggttagatacaggatcaaagggggagccccagccaggacaccatgaccctgaccccagacccccagcttccttgctctgagcatacatcttgcaaatatgtggctgtcactacaaaggacatgggcataccccgcccgacagtcttggtcctgccgctgatgagtaggtagtagcatccttactcttttcctgagtttgggtgtcccttgcctcctaaagtaggaaggcaaggagcagagcaaggagggggcctggggacacagcctatcagctatgtcaggcttctgtgtgcctgctgatttcccagactacctccagaaaccagccatcaactgtactgaaatccaacaccaggctggacgtggtggctcacgcctgtaatcccagcactttgagaggccaaggctggtggatcacctgaagtcaggagtttgagaccagcctggccaacatggtgaaactctgtctctactacaaatacaaaaattagccaggcatggtggtgcacacctgtggtcccagctacttgggaggctgaggcagaagaactgcttgaacccgggaggcagaggttgcagtgagcccagattgcgccactgtactccagcctgggcaatggagggagaccctgtctccaaaaaaaacaaaaacaaaaccaaaaaaaagaaatccaacaccagaagcagctatgcttggagctcttacagcagagactcaaaaacgcagatgcccaaaggggcagaaaatacataaggggtgtcagccgcctgggactacagaaagcagtggagcttgacttaatgggaaaggactcgccatccaaggggacagtgccatttgcttcagtggttgccatgtggactacagattgtattactagactgttcgattttctttttttaaagaaatcagatatccagttttttatatgcaacttaaaaacttttaaaaaaaattttatagagacaagtctcactatgttgcccaggctggtcttgaactcctagcctcaagtaatccccctgcctccgcctcccaaagtattgggattataggtctgagctcctatgtccagcctatgtgcaatcttttaatctttaaatgttggcactgagttgacactaaaataataattaaacaccatgcaggttccaaaaaaagaaaaatcacatttgtgcaccacatgctcacctaggcataggttagcagccttggccagagagtctgcccactgtggtgctgggaccttcgcacactgatgcctccccctccaccccgaacaggagcctacagagatggttcatatcatgcctctctttgtgaacatgggcacacaagtgtgagcatatacaaatttgcttctggaatttttgttgaagagcttagtcgtccctcatagaatgcattattttgtcttcagtggctttacttccaggcttatcagggaagaagtggtttgaaacatcagagccctaaacaaacaaacaaagtaaaacagaactcagaattcaggctaccagtctggctgatgcatctctacaccttcaaacaaagatttaccactttattcaagttttagttatccataaatttgtgaaagtaaagtggtggcattttaaaactctctaaaaaggaacaaaatgctctttttcagagcttcaaatgggcacacgacagaaagaacttctggacatcgacagttcctccgtgattcttgaagatggaatcaccaagctaaacaccattggccactatgaggtaagagcaagacttgaccccgtgtctccttcctcatccccaatcctagtcccatggacattcttttaaaacatccaggactcccacccatttcctggaatgacttgcagatcgatcgtgtctggggctgaagttttctttcgttgcttgtgcagacaagcccatgaagggctctcacagtgtacttgtcacgtattcccttctcagaaggctatgattttctatctcctgaactctctccaccctgaggttcagcagaaaagaacccaggaaaaaagtctaggaaagccagagaagagttatcctttagccttcactgggtgacaagcgtgctgatgctaaacaaagcccgggaagtcccaagcctcgcctccctccacaacattcacagtagaccttgtaaccttttgtgtaggtccttgcttcctgaagaagttctaaatttcctgtttgtttgcaatattgagcgatacttcctttggcctcttaacccacatactgggtgagtgccgagggcggtgaggggtgcacgtgacttctcagagatctgagtgccagagaaacctgcacataacaagacagaggaggcagtgaaggttcctgaacacactgggatactggggttcacttgtttagcagtattatctgaatctttgttgaatatccactctgataagagctggggctgcatgggagaggagcaaagaccaggtccctgccctcacagagcctgcagccctggggaaggagtgcaaaaaaggacggagagacaagtagagtcaacaccttgcgtgtagtagtgctgtgtggcttggagaatccaagaggcttcctggaggaggttatgactgaactgagagctaaacaatgagaatttagccagactgggctagggtgcaggcacatccagcagggaagggagagcatgcgtgttagactagtcaaaacttgagaggggcaatggagagggggaaggagggcagtgacagctgattatagtcagtgcttatgaagtacttacaccacaccaggtactatttccagcatgtccctgtaatgtaactgcccaacaggttcaccttccccattgcctagacagagctgatttatcaagacaggaattgagataaagtaatttggctgtacgggagacgggagttttattattactcaaatcagtctccctgagcgttcagggatgagagtttttaaggacaacttggtgggttgggggaagccagtgagccaggagtgctgattggtcaggtcagagatgaaatcataggaagtcaaagctgtcttcttgcactgagtcagttcctggggtgggggccacaagatcagatgagccagtttattaatctgggtggtaccagctgatccatcaagagcagggtctgggccaggcgtggtggctcacgcctgtaatcccagcacttcgggaggctgaggtgggtggatcacctgaggtcaggagtccaacaccagcctggccaacacggtaaaacgctgtctctaaaaatacaaaaaaattagccgggcatggtggtgcacatctgtaatcccagctacttgggaggctgaggcaggagaattgcttgaacccgggaggcggaggttgcagtgagctgagatggtgccatggcactccagcctgtgcgacagagcaagactccatgtcaggggaaaaaaaaaaaaaaaaaaaaagcagggtttgcaaaatatctcaagcactggtcttaggttttacaatagtgattttatccccaggagcaatttggggagagtcagaatcttgtagcctccagctgcatgattcctaaaccacaatcccaatcttgtggctaatttgttagtcctatgaaggcaatctagtccccaggcaagaaggtggttttgggaaagggctgttgttgtctttgttttaaactgtaagttcctcccaaagttagttcagtctacatccagaaatgagcaagagcagcttggaggttagaagcaagatggagttggttaggtcagatctcttcactgtcttctaacacatctgcttcaccgtcttataacagtgaaaggcatctgaaaggtttgtttcagatgtttttcactgttcacctttcagatgtctttcactgttatagttttgcaatggcgatttcagtatttcgccccattctatcctatagcagtcctacgagataggtactattattaaccccactttatagatgggtacgatgaggctctgggaggtctggtaacagctagtcagtggcagggccagattcggacctggatagttggctgtagggtctgtggctgaaccagtccatgctgtggcctcttacaagatgtaggggtagggaggcaagcagggaagatgcagatcacacagatgggggcagcctcttcaggagttctgagtcttatcccaagaacagtgggaagccatgggaggtcctgaagcagggaggttagtatttcagaaaatgagtggggctgtgtgtgagatgtagatagaaggggtgcaaacctggaaatagccccattagaagctgtggatttctggtgaggattggtgctgtccagcaataatgcagtggctctggacagacacagagacacacaaatggaatcagatgctcaggaggaggacaccacaagtcacgtggatgggagggatagtaagatgagggtggggtcaaagatatcagttggggatgactgtgcagatgcctggaggcaggtgctttcctagagaagacaggaggaggagcagcttcccagcacaccgggagggtagggaccccctgtttttcatggctgtacagtcccagggtgacaggtctgcaccaggaaggacctaggactctgccagattctccccttgcccaggaagaagtgagactgttcccgagcagagcttcttagacaatggccagggacagagaacacccatccttgggctttttggctgagtgggtcacccagtttgaaagtggttgcgttgggtgatgactgaggtgctgcccctgtggcattgctgtagggagtctagcagagaaagctgcaggctagcaacttgccccgtgctcactctcctatagctcagacttgccaaccctggaatcatcttgccaagagcagtcgttcttagcttttggagtttgtaaaaatccccagggagttttctaaaagtgtgcattcttgggctcaggaataaggggcatctttggctgtatttggaaaaacacggccccagagggaaggtaatggccaggaggagatcggagtcagagatgctgccctgctgggtggaagtgcttatcatggcatcagttcagggttctagacctgcaagccagcacctctccctgtgtctgggtggcaggcttgtcttgatgagttaggaggggacacagactccaaggccctcctctggtgctgttgactggagttcttgtcttgctcagctgtgcctcccctgccaggcttctcagcatcccttggccactgtggggcatggggtgggccgcagaggcaggggatggggctacccactgccattaataggaggaggcagggcaagtctctccagcagggagaatgaagaaccaccacagctgtctgcaaggcaaggtgaaggcctgtcgggagagatagaacatcagtcttcactgcagacatcggccgtgctagacacctatctgcttaaggatgataatgaaattaatccggcctgtagtcacttcccgtccaaatgatttattggcctcataccccagtgttgctgcatggtggtaataaatgacaagcctaggacatgaaggcttaaaggattctccttatgtttaaaaagctaagccataaggcaaataaaccagagagcctgaaggaaacgggaggtcattgggctccatgttctctatgcctggaccatctcaaaagccctgttttttaaaggctgcttggagaaaatcatcccccaccaccctcagccacctacatctatatttgattaagcagcgcctccgcagactcaacatttgggagtaatttgacagggctgggctgaagtttgcttttacccttttgttaaagaaaaaattttctcttgagcactagcatttccctccaaagagacaagatgctaattatcactcttattcatttactaaagcaccctagtttgagtcactgtatgtgcttaaaagcaaaaaaaaaaaaaaaaaaaaaaaaaattcatttaaaaatagggtctaattcagagttttaagtgaatcagactcacctccctccaattagtccacattagttaggttttaaagttaatctgtagtgacggccagttcctcctactatctaaacaaagtccctgctgttggagagccagcctgtttcttctttccttgtctgtccttagggcaaacagagtgtagctggtctcgtctgaatgatttactctcagcacatttgaagaacaggtttctagaggggatttgagggcatgacaaaaatatagcatctcatggactagatgcagcccccagagccccacattgctggcagggccctgtcacctactggctgacacccttggcaacccccagcaccggggaattgctttccatgacaataaccatggcagccagtgcctggcactgctcacatgcattagttcaattaatgtccacaaaaaccctgggaggcaggtgctttccttactcccattttccatctgatgaacacagaggagggtgcatttctgttccagtgtcattctgtcctgtgcagacaaagggttaagcgtgtctttacacatgaagccagaggagtctttctcccctataattaaaccctcccggtgcgcttccttaactggatgtcattctgtgtgcgttgactatgaaggggactgtgctttgctctggtgccaacagggtctggggcatgtgcacctgcatgttcagggagtggggcacactcgtcccctaggactgtggcagggtggtttctctggagtccagccttcttcctctcactcgcaccctgctgtgacctttggctgggccgagttattgcacccgcaccctgctatggagtagtggcgagtgtgcaggacaggtgttgggcaggaaattttctctaaagattacacttcgagttctgagctgcaaggttttgagaggcagaaatgttgtttaaccgctttcattaacagatgtgtactaatgcagaagtggtcactgctaacaaatttgtaattcaaaagatatttaaagctcataggaatgccccaaagggtctgttaagtaaggtcagcaatgcttctggtcaagtccatcatctgtgacactaaaagggactggacaatcgctaaaggtctgttgcagtgtgaatgtctttagatattcatttaacaaacacgtataatgcttcttgtgtactgggtactgttctagggctttgaccaacagcagctctttccgtcttctttaccgctccatgaggtgaatactatcagccccattctgaggcccagggaggctaagaaacttggccagagtcacagagttccttcactgatgcctcaaggcttgaaagcaggcgaaataaccactctagagactgtggctctgcgcagggcctgagggataccttcccccagatccaggctttcagcccatgctcctaacctccgaggcagcctggctagagagctgggcctgattgaggagaaatcctggtagttacattctctgatgtcaaattcataaagggtaacttctcttaaaatcccagggtgaatctcgtgtctgtgagtttatcaaaatgcttccctacttctactttaaccctctttttggccagcagtccgtgaagatgacagttaccttcatccaaagggggcctctctcaggcatctgggctctgacaactccaacccaacaggatcactcttgagtcttaagtgttcaggtcttcgcagtttcccacacattcttggtggcccaactccctcaggaggaagacagtctcagggctatcactaataggccgcagaaggagctggctagtggcctggaggttaatttcaagtaaacaagagagaagcaggagccctgtggcattttctctggtttccagcatcctgtaagccctcccctggatgtccagaaccttctgtgtgatttgaccagcctgtggaggatgttctgacggccccttccaatgcactggtgaacccctgtgctgaaggactcagcaaggttatccctcaagccctgagaaacaagattttgttttcatcagtttccagccttggggcatcagtgagaagagctgagggagaagacgatactgacggagggagagcaatattggcacgtggctgctgggacagcatgtggaatagaattctgttttcacgtaatattgtttcagcagaaaaggtgatttcaggaatgagagatttcaatcagagtttctgtgtagtgatttgattctcatgttttcagatttttttctttaaattatcacaatattcagaacatattcataatttttcataaaatttatagctacaatgccagcatttctcttaggtggagccatatgaaattgtcaataggtgaccatttttacctacaaaagtggtagtttcataaggttaaacataagttcaaccttacatttctagaaaatctcttttcatggaattctaagctgtgccataaacatggtatcttataaagaaatcttaccttcacttgcaagtggtttggaggatgtgtagctcctgtttattttggaaatgacttaaagttgttgatatgggtctttttctccctgagtgattacaacttctcattctaatgatgggaaagtctacagtcatctctgccacttctaacgtggggtggccccaattcccctccattgatgattggaggggaatcgcttgttgtcacatcgaatcctagaaccctgtgagactggaaggaatttaatttgaaattgccgtgcgtaccagttctgctctgggctggagaaacaatcctgctgcagatccatctagtgacattaatctttctttgacttaatttggttttcatccctaaagtaggggcccagaggacgctccctgcctcacaggactaggggacgattaatgagtcactcttagaagagcatttggagctcctcagatggaacaaatggcatctttttaacactctgcattccagggcacttttcaaaaaggcatttctgtccttacctcagcagcagctgacttgtgctaaaaagaaaacggaaacctttcccccacaaacatctgtaaataaactatttttctgtctttataatcgtgttaaagtgtcacatgggggaaatgttccagctctagagcagctgtgaaagttagaaatgcactcacacatacgcgctcacacacacacacaactcatccactaataaaatgtttctacacttgctcttgggagataatttcagagtaaaatttccttggtacaagctgtgtctatgctatcttaatgcctgagcacagcactagcagcgggctgttgccagctcttgaggagacatttgaacttttggcagcgttccttatcagaaggcccatccgaggtatttgtgattatagagtaagggtgctcgcttttggcaaaacaaagcgtctgacagtagtgaagtactggctcaacactcaatgggagacatttgggattcattctttgacaattacccagaatgaatcatcagcttccttttataaaaagatatttattggcttagaaacagagcatatccagctcttcgtggggaggaattttgtaactatgttcaaagcttctcataaactcggtgtctgagtattgctaagggggtgcctgcacagagcatttagtttaattgcatcaaatatggaggagaattgaaaaatcagccagcaaacaatgaatagctcaaggggaaaaggagaggatgctcgttaataggagcagagtcgaagagctcagtaagagttaagaatccctgctggagtcactttgcagaggcctgatggccccagccggcccctgcccagtgctgcccccaccccaccaccaagatatcatgcacaccagcagttggaggcctctggcctaaacttagcggctggctggacagctgtgtttgaggacctcttgagggctggctcttgctctgtgttcctccctgtgggtgtaacctgaaggagattaggttttaatcctttggtgcttgctaggtgggctagtacattctgataaccaatgtgcagcaggccagaagagaaattctaggtttccactctttccaaactgggaaggcaaggtccaaattaatattagaattgagaatagctttggagcttcagaatggagggaaaagtcacttagctgataaggttcagaagtgacagggtcagtcctccagaaacagttccagaatgaaggagatttgtggatctctgacctgcctccttcttgccacccgtttgtcttgtaattttgtgaatgagcccctcctcccacagagccaggcctgcccccagcatcttggcatctttgtccccctttgcccgaagggcacttccttgcttggggatttgcgagtgcccatcagggtgtgggggaggggcactgtagggccacttgaccctggtttccatggtaccaaaaggtcttaggtgagaacgcttgattttaactccaaaagaggcaatatatacagaggcctgcctttgtcaaatgtatacatttaaaatctgtggcaattcttatcagttctattgaagcataatttttgagacagggtcttgctctgttgcccaggctggagtgcagtggcacaatcgtggctcactgcacccttgacctcccacgctcaagccatcctcctgcctcagctgggactacaggcgtgtgccacaatgctcagcgcttttttgtttgtttgtttgttttgaggagagatggggatctgagttctccgggctggtcttgaactcctaggatcaagcaatcctactgccttggcttcccaaagagctgggattacagtcatgaaccactgtgtccagccaaaatataattcatattaccataaagctaattcgtttaaagtatacaatacagtggttttaggtatacttatagaattgagcaaccattgccacaatctaattttagaacattttcatccctcccgaagaaaccttgaattcattaacagtcactccttatttcccccagccctgctttagccaactagtaatctacgatctgtctatataaatttgcccattttggacatttcgtatattctttttagattcgtgggtacatgtgcaggtttgctacaagggtatactgcatgatgctgaggtgtgggcttctattgatcccatcacccagtgaacgtagtacccaacaggaactttttcagcccttgccccagacccatccccgcttttggagtccctcatgtctactgctcccatctttatagacacttcatatcaataggaccatacaatatgtggtcttttgtgactggcttcttcgcgtgtttttgcagttcatccatgctgtagcatgtatcggtaattctttccttttattgtatggcaatttttggtagtatattcatactacatgaactaacacatagtaataatgaactacttgtagttgcaacatgaatacatgtcacagaccttatactgaccctcaaaatctagacacagtacatactgtatgattctatttatatgatacccaagaacaggcaaaattcataaatggtgatggaagacagaaaagtaattacctctggatgaagatggggtggtcattgtctcggaagggacaatgggagcacttttcaggaccttgcaatattttatatcttgataaaggtggtggttatgccagtatatatttaatgtgaatagtcattgagctgcacacttaatattagcaaaagttaagcatgtcccacattatgcttacatttcaaagcttttattaaaaagtatatgcaaattttgtgattttacaagcttttgaaaaaatgtcacaggttgaatatcccttatccaaaatgcttggaaccacaagtatttcagattttggaatttgcttggattctagaatatttgcatacacataatgaaatattttagtgacaggacccatgtttaaacacagaatttatttatgtttcatatacaccttgtacacagagcctgaaggtaattttatataatttgtgcacaaatcaaagtttttattgggttttgactgtcactcatgctatcatgagttcaggtgccgaattttccacttgtggcaccacgttagcacccacaacgtttcagattttggagcattttgaattttcggattagggatgctcaacctgtatatacctacagaaaaacaaataaattataagcgtactgctggatgaattatcatcaagtgagcatatcctgaaactaccacccatgtcaaaaaatagaagccctctcctggcctttcctaatcactaccgctgctctcttctccaaatatctaacatgatagttttgactgtttgggctttttcttttttcaagctctatgtaaatggaatcagtcagtatactttcttttctgtcgagcttcttctgctcaacattatgattgtaagatttacccatgtggcgtgtaacagtagtttgctcattttcattgttttataaactgttgtataaatatgccccaaattattcattctgatgatggatgtttgagttgtttccagtatgggacaattacaaatcgctccctatcaggatttatacttatttctgtggactaaggacctacatgtgaaatggctctgtcatagggtagataccaactttatataccacaatttctgaaaacccatttcagcatttcttaatagagtagtgtcatagtcagttcgggctgctataacagaataccattgactgggtggcttaaacatttgttccttatagttccagagactggaagttcactgtctgggcaaagtactagtagctcggtgaggaccctcctcctggtttgctgagagccgtcttcttgtatccttgtgtagtggaaagcagaggggaccagcaagctctgctgtctcttccttttcctcctctgtttagagacaaggtctcactctgtcgcccaggctggagtagagtggcacagtcagggctcactgcagccttggatgtctgggctcaagtgatcctctcacctcagcctcccaggtagctgggactacaggtgtgcaccaatgcgcccagataattaaaaaaattttttttatacagagggatctccctatgttgcccaggctggtctcaaaactcctggactcaaggatcctcctcttcttcctcccaaagtgctgggatcgcaggagtgaggcaccacgcccagccctggtgtctcttcttataagggcactattcccatcatgagggctccaacctcatgacttagtcacctcccaaaggccctacctcctaataccatcacactgggattaggatttaaacataggaatctggaggagacacaaacattcagtccatagcaagtaacaattttttaacctcaaaaaatgaaactggcctaggtcttgcctgacctctgcgaattggggggaatgtcctaacacagctcagtcttcccctcttccagggcttcccacctcccatctgtcccacagggtcctggcctccaccttctgcgtactaccccactgcctcccatggcctcatcagcctcctccacaggaccatgagccccttgaggacagagacactgccttgcttgtcatttagtcccagcctccagcacagtgcccagaacatagtaattcttgataaatatttgatttaataagtgacagcatgtaagatccatccagccatctaattcctgggtgaagttgagaaatccattaaattttgaacactcatatatcttttatctttggtttcagatatcaaatggatccactataaaagtctttaagaagatagcaaattttacttcaggtaaccaatataatattgttaaccttttgttctcacccagcttcataaagtattgctttttgcctctctcagctgtattgtcacaaaggtgagattgagttgttgctatgtaattctctgaaagttgagaaaagtcattttgatctctttgcagtcctaagaatgtgatccctgcaagaaggaaaggaaactatagatggtggttggcctggactgcccagcactgaggaagtggctgcctctttatagccctaaactcagggcagaatctcatagctttttttcaaccctttagaaggatggggcctaacagaggagatccccctggcaaactgagagggaagagtacagacaatcatcacagagccccgaagcaagcgctgaacaaacaagataatccacttagaaggtccaagtctcctgtgatagcacttgcaaaattcccagaaattggagagagacaaactaaagggggaacttttatgggaaagtcaataggctggtctctaaagtgatcttctgcttccctgatagccctggggcaggaaattcctgttccaggtttgtctccagagaaattataccccagtcaagacaatcagctctcagcccttggaaaggttctgagctcctcccaaacaggctcctttcacacacacagccagaggtagggcttcctgacttctggattcactattagaaggagcagggagcatctggccagtgcaaacagggaatgtggggttcttgattatacagacaggataattgggtaggactcctttggggaaacccaccttccatcactatatggggctgtggtgaagccatcttgcagagatcattccagcttaagggggatggtgtctttgtgttgaaaagtggaagagcatggtttttaggtttcaaagattgggccttttgaagagcctattatttggggattgaatagtagaatcttaggtttggatctcttcgtgggccctccagtcagtcaacactgctgctagtttccattcactgcaactgagagccaccgtcttacaccctgctaatactctaaacctcctgtacctctgtcctatcatcagcccctctgtcaaaatcccaacgctggatgaacccaacgattatcctttcctgaccctacagctagggagccacagaagaaaggcacataatggcacacagtgggtcactataagttcatggtacccaacttgaccagggccctccacacagcctgctctcattgggttcctctgggcaattcaactctgtgttgtccataatgtctgccttctctcctcaaagctttgacccacacagctctcctctcagcagatgacttcaccctgcactctttacagagaaaactaatcagaagtccttcaacagccagtagcaaacctaccaacctacctgcacctgccttcttccttgatgcttgtaggctgaccttcttccattcaaggccagtctctcacctgtgctttgggtccaccatcctttccaaccttcttggtatccttacaccaccagtaatctcttttctcacctgtactttcttttcctctccatctactccccattttccattagcatttcaagatgtgctcgtctctctcatctttatttttaagacagtgtctcgctgtcacccaggctgtagtgcagtggtacaatcatggctcactgaagcctcaacctgctgggctcaaatgatcctcccacctcagcctcccaagtagctgggattacaggagtgtgctaccatgctcagatactctttaaaattttttgtagaaatgaggtctcgctacattgtccaggctggtcttgaaatctggactcaggcagtcctcctgccttggcttcccaaagtgctgggattacagatgtgagccactgagcctctctcaactttaaaacaaacaaaccaaatgccttacttcctctcttccctccatttaccactcccttaccctttacagccacatttcctcactctgcgctactcttgacttgctctgtgagcaccacctcattgtcctttgagatcctagaaagggtcagctccttcctacctttggaccttcctgcaatttgcctagctgactctatctcttcattagattcagctcaagcatcccttcctcaaaaactcctggactagatttggtctcttgttaattctttagcatataattctccttcataacctttatcacagttataataattgtgtacctagaagtttgatgtctctcattggccagaatgcaaattccatcagggtgggaactgggtcttattcattgctatatgcccagtagtccctggcacataggaggtgttctaggtacatttgttaaatgaatgaggcttgagcctctcctaccagcaagagatcagagatcactagggaatctacttcctcctccaatccctcacccgtcccatcttcacgctgttcttaagatcttaagatgcagcagggggaaaaatgtagctatggagagctcaagtcaaaaagctcaagtaacttcagtatacagcacaaatggggccttttaagagaaggccgattagcccatggttgctttttttaatggactgctttctctccctctttctctggcattcagatgtggagtactcggatgaccactgccatttggtgagttcaggctttcttgtgctcaccactgaactgcatgccttctgtagcaagagtggtctccttgggtaacgcttctgctgtcttcccttcagattttaccagattcggaagcattccaagatgtgcaaggaaagagacatcgagggaagcacaagttcaaagtaaaagaaatgtatctgacaaagctgctgtcgaccaaggtacacttactgttctgggagcactttatggctacctagggggtgtatgatatgtttgacttaatttccactgaagtgtgaaaatgttacaaatcccttgtgccttctagcaaagcaaaatgaaagtttaaattgtaaacacttcctacccagttcctcttctttttatacactacaaagataacagcactttacagatttgtactgtagtatcttcagtcagggatttaatattgttcccagtctctttctccaccatttcactattattgttattttttaggttgacagcataattattccttttggtttacttgttattatagatgagcaataaaactccctttttgaattgcgaataaaatgaaggggatgggaagggtcaatgactataaacctagtaaatcttaatttttgtttttcattttaaaattaagaattctgctcacacataaaagtgtcagatgtgaaagccggtggaataccaaaccgagagcaaattttactttatctggcttttagtggaattaacagaagtctgtggtgatcttttttttcctccccctctggaatgatgagcactataaatgctatgatctacacttggccccaggaacttgatgggcatgcttcttcagattataacaaagaatctgcttagagcttaggagatttgtttagtgggcagaggacagcccaagcctcttgattttctcagctgtcccatagagcccagcctatttggcttttgtgaaatactcaaatgctttggaaagtacacaataaaactttatgatagaaatatatgcaacaggaaaaattctgggaacagagcagcatcacttgagcttttccaggctgaacataactaataaaagccaaatatccatggcttcctggtttatgtaaacagccctacaactgacatttcaactgctagagatttctgatatcctcccagttgactaaacaatgttatcagcaagaagcttatgaaccaaatctaaacctgggcatggattttcaagacttttgacctatactgtgagcactggccacatttgacaattttacatttttctcttcagtttgtttttccctgttttgaacattattttctctgaatgtggatttgcttttgctattatgttttcaaaaccactaccacagtttttaatctcccaaatctgatgttgtctatctttcaggtggcaattcattctgtgcttgaaaaactttttagaagcatttggagtttacccaacagcagagctccatttgctataaaatacttttttgactttttggacgcccaggctgaaaacaaaaaaatcacagatcctgacgtcgtacatatttggaaaacaaacaggtgggaatgtaggtgattagtgactgttttcaagaatctgggacagaatattaactaaaagaaagacatagatagttatagaaggattcatttatctctatatcagaatctttgggcttggtaagctatcatgtcaaagtagtttcttattctgttactatttttaaacaataaaggaaaccattcctatgccaagaatcctgttcttgaagataaactgttatctttggtgcatgatactttgtctagaatgttaaaagaaatttaagttgaccagtaaagaatgagaaattaacatttgtggttttatatcatttttgcattagagaaaattttatgataaaccattttttgttcctaatcggttactttgcagtctccaagctgtctatactctgattctgtacagaaatttatcaagtgcagtactcagatactatgagaattagccaaaagtttgtgttttgttttatattttaatattttaccttaaggacaggcaaggcatccaaattttgcctcctcagtaaagaaatgtagctcatgagctctctttgaaatgctgtgtgcatgggctggataagactcagagttatgatgaagtagaacttctcagtgcaagctcaaggctttccaggcactgagggcagccaggtcactttaaatgagtatcaaaagctgaagttcctctaggtctaatctcccatttaatccaggcctatcccaattctctacgctggcttgctcccttctcttcctgtgttctagcctctttttttttgagacagggtctcactcttgttgcccaggctgcagtgcagtggtgggatctcggttcactgcaacctctgcctactgggctcaagcaattctcccacctcagcttcccaagtagctggaattacacgagcatgccaccgcactcagctaacttttaaaactttttgtgagatgaggtctcactacactgcccaggctggtctcaaactcctggactcaagccatcctcctgcttcagcctaccaaagtagtgagattacaggtgtgagccactgcccctggcctgttctagcctcttatctccagtccctgccactcccacatcaagactgggagctgagggccaccattccaccttgaagattatggcatctgagcaggggcagcagccaggacagtagagctgttgggagacctagcagcatatgggggaggtaatgagctaggccagagttgaaaaggagataatggaaggactttgaaccagtcccaagttcatgttcgggtatttgagtacctactatgggccaagcagttagttgctggagatatagtaacaaaacagatgaaagtccaggtcccattctaatagttggggacagacactaaatgcaatatgcaaacagtagcacattagcagatgatgagtgcagtggagaaagtaggaaaggaggctagtatgtgtcaggactaggtgatctgagaaggcctcacagagatggtgacacttgaaccaagtcttgaaagaggagagggcataaaccatgagactacctgaggcaagaaagtttcaggcagacagacgccaagagcacaagttgtgaggcacgtgcttgcttggcccatatgaaaaatagcaaggagaacaggagagttggaatgagcgcggtgaggagcagtgggataggagggccaggtcatgcagggtgttatccagagggagatggagagcctcagagggttggagcagaggagagacatggtctgattctgtgttgagaggactgctgatagttatgtgagaacaaactgtcaggagatgggaaataatccaggtgagagagattataatcaagagctatctggagaaaattcttgcccatggccactttcaaacttaccctcctctatccttcttttacagtagctctgccagttaaccctttcttcttctctccaagtgacgcttctgtctgttgcttggtatgtttggctaagcagagttgtatacttcaataacaaggacaaaaacacccgtttacaaactgtgataaacagaccattggcttcatgaatggccctatttgaaaagagattattctctctttgaacagccttcctcttcgcttctgggtaaacatcctgaagaaccctcagtttgtctttgacattaagaagacaccacatatagacggctgtttgtcagtgattgcccaggcattcatggatgcattttctctcacagagcagcaactagggaaggtaaggcccagcttgagtatttcttgtatgcagtcttatgagtttgacatacttgtctttctgataagcattcaaataataaacaattggtctaaactacaccagctaaaaagagatagcaagggccactgtcaatttgctgttatttaaaatctgtctcattatttttaatctaatttttttaaagtgaaaaacaaaataattagccccacccaactgcagaattctgcctgtgaaaaactttatcacaaagtatgcgttttgtttcctagaaaaatattctatggacactgataaactattaacccaaaatatgcaaccattgaaatttgcctaaatcaattctatttgaatatacataaaatgcctatttgaatataacacattgcttatgggacacaaaatcttgctcaagatttctaacaataccagtttgtcagtttctaatcaaagcatgagtactgttttcctatggttttctttgctgatcaatagtcccaagaactcaaagaaagacaaaaatcagagcaaacttcgaaagagatgttttggtcttatttgagcgctccaaaatatactaaactgagcaatatctgtgcctaatggatctttgaacactgaggaggagttcttgggcaggactttaagagtacctggaatgaatggagactgatgttccacaggtgcctcagactcccagtcataatctaaactctttatcagcagtatttctgcaaaacaaacctgtttttacttttgtcttccctagcattgcctagtctctcaaggtagaatcctcaacgttatctttgactcctcttccttccaacctctatccccaaattattggttaccacttacttctgtctcaaatgtctgtcgctccctcctccttccttagccttatcacttagccttatcccttcatcccgtccctactgggataactgcttcctaattggtgtccttgcccctgctgtccacctttccttctaaacttttccttttcactgtctctcaggtaatctttctaaaacataaatctgatgatgtcagtctgcttcttaaaaattgcaactatttcccattacctaccagctaaagtcttcacagtgccacatagtgcttcctgatgggcttcagccctctttgctggcctcgttattttcttgcacgccccacatacccactgtgctacagcttttacttttcccaagttcacaccatgaacttgttctcacacccctttgctcatctttcctgtctcacagtccctctgtctagtaaaatcctacccattcattcatcataaacattttattcattcgacaaatatgatttcctaatgaggaccagaaactgtaggagactcagatcagtctacatatgcctactttgtgaactttccccaatatatttcctacagcactttcttcatttgactaataaagttcatcttagcatgcagcacactgaaaggcacttaaatgtttgttcacactaaaaacagttgtttatgaattatgttcttgacacacttcacttaatcctcacaagtaccaaataaggtagttattattaccctcattttatagatgagaaaattgatgttctgggaggttacaagtcttgcctgaaaccacacaaagtagcagaattatgatttctgatttgtccaactctttctgtcaactactgctgctaattatttgtatcatagtaagcacttcataaatctgtctttgcaactagattgtaagcttctcaagggcagccactagtctttatcattgtactctcaatgcctgctccagtgcttaataatgtttattgaatgaatgaatgatagcatgatttctgggttccacttaaatttgacaaatgagaaaatctcaataatatctcagtctctaggcatccttcagaatgattcatcaagccattgattcagcctcatgggctgggacattagccctatcattaacttacctatcttccctgagtagaattttttaaagttttgtgaaaaataatgatttttaaaaataaaatcatatttaatttttaaatatcactgttataattacgtagaatcattcaaattgccagagaacctctgcaaaatcacacatcagagccaccaatactaatgaccatgtgcttccctgaagaaactggatgatgtctataatctaatgaaataaaagggacaagctggaaaatctgcctctgccaattacttaccagtttcatggttatataaagggctcaatcagacctacaatcaagtcttttgtaaatgccaaattcactggtgggtgaggatgagagcaaatgttttaattcaggctttttacaaccattagtaatgaactatgattgaaataagttccattgttacagtaactcaaaatcatgcaaaaataataattttagttcttttatgagaggaaggcagaatatattagcatttaatctgcctgaaaataacagtgactcaccagaactatctagatagcagtcagtcattcagtcaacaacatttaaggcctactgcatgaagccttgttagcaagaggtaaaactggttggtggtgggggttcagctacattggaatattataaattcctccatctttttttttttttttttttactcttttggtgatggttgctttttttttttttttttccccaggaagcaccaactaataagcttctctatgccaaggatatcccaacctacaaagaagaagtaaaatcttattacaaagcaatcagggatttgcctccattgtcatcctcagaaatggaagaatttttaactcaggaatctaaggtatcattagaaagcagaaataagcttatatttggttactttacgtcatttcagaatctctcaacaagtctttcttttagaaacatgaaaatgaatttaatgaagaagtggccttgacagaaatttacaaatacatcgtaaaatattttgatgaggtaagattttaaataacattgtttttaacctttgaatcaggcacaaggatgtggttatagcattctgtcagtttcagaacagctctggcatcccaaaaggccagaaagggaagccaggaagcctgtctgagatgggggatcctggcactgagccagaccctgtacatggctgccccccttacagttttatcatgctgcccacatttggaccagcctgaatttacatttgagttcatggggcctacagccaccctgactcaagttaactttgatgagtaagtagtggccctattaaatggggtcagcttatgcttgattgtaatttgctaaaaatgaaagctaagcttgttaaattgcctagattctgtattcaatcgttatatgaaattatgacatatttctaacttaagcgactatttcaataaaccattctcctttatgattaattctccttaatctgggtttttttctttggaaattcaaacagacacattcatcagatgctttgtttccaaacaaatgttaactcccccttccctgattcccccccaatcatgctgggacaggctatccatgtcaatggtgagaatagctcaccaattccatttgctacttgaagatgaagtgaagctctaaggtagggtagaggcaatgagttcttaaacatgataagcatccctcgttccaggggtcaggggagagaagggaagcacgaggagggactacactgcccagatgggagggaagggaaggatctgtctctgaccaggatgtccctgcctgctgcatttaaggagaaatacttgcctgcatgttggctgcccaggaatgcttgctgtgcttggaatggctgtgacataatgcataaagcagggcctaggaagcctggccccatatttgtaagcaaatagttggtatttcttgcgagcttctattttaagccaaggtattgttgatcctgtgataaggacttagcaaaacaacttgcaaagtgagtatgtaaatgatggaagaaaatgttggcatctgtttcatacagattttaccactcacagcatcaggtatgcaaaaaacagaattgtaacgctaaaaccacaatatctaaaataactgttctaattgtcaacagattctaaataaactagaaagagaacgagggctggaagaagctcagaaacaactcttgcatgtaaaagtcttatttgatgaaaagaagaaatgcaagtggatgtaagcactctggggcctggcttaatctggcaaagttcttcagacgacttgggagcaaaatggctgcttgagctactctgtgtcgttaatttgttgtttgcacataggttccactttgggcactgtctttttaagagaccaaggcacatgcacagcttttagaaagcataccaacccttgtgcctgtgtgtataccgtgggaacccttctgtaaatagagttgaagtggttgttgcaaacagcctccttgtttacagagaatacaaggccagtaagcgaatgtcagtattgtaactacagtctccacttaagcacaatgatataagtggttttgtttgaaaactacagctatgtagcacttgtgctacactgcacctctgcattgtaaagggatactgccagtgctcaaaacaaaatgtgaaatgagtcatttggaaacaaggtgggggtgttagggcaacctcgaggatttgcagcattgaaactttccccagtagttcttggaaaagctgaccgcagaatttggtagtgtacacttagcatttgtgagtgtgtgtgtgtgtttaaaccaaaaactaacagtgttgcaacattgttgaaagggctcgtgtttttcagtggtcatcaactgcactccatcaaactcacctccatttcaccaaggagctctaaagtaaggagagtgggctttatttaaatgaacagcattttaaccagatactttgtcctaatgtatgttccttttcttcatctgttttttcatactaaatgtatttgatagtggacatgttggatattatacaaaaaaatcattaattcatttctgttccaaaacctttgatcagaacgatctgtggaagagtaactccatttctatatgagtgagtgtctccttgctttagatttctggtgaaccctgtggttatgaatacttgtgtgtgatttaaaaaaaaaaagatacattttacattttatcgaattgctgttcacactggagtattatatataaatatatatatttgaggcccaaggcctgaaaaatattagtatacaacttggtatcttagtcttactatgtactttttgaaagtattcctcgcaggagaaagaatttaaaatacccattttattcatgcctttctttttaaagaattctctatccagttatactgtagtctttttagtgctgattttttaattcctgaatttttgctgctcatgaccagttttaataccactgtgttttccttctattaaaccagaagaagtaaacagcataattggcaactcttgagcttttcttgtggcaggcaccttttacccttggtgctccaaatcccccatctaggaaagaaaattttttcaagtcaaataacattgatcacatattccttgaaatcatttaccaacactgtatggagcattaggatttaaatatgaatttgtcttaaaggcaattcctttttgcttctgtattatctggaaaagcatgagagaggtgacacctcaacaaactgatcagagaaaataagcagttactaccctgataggcaccttcccaatcctgttgcttttgaccattgtctgtccaacggacacacctcaaacaaacaaaactaccaaatagatgacagatcagaataaaggtgagaggtctggtccccattgaaggctgctacagtcttcaaagaggtgaaggagttcataagagaacaacagtaggaaagttgagagccaagggtaggagagttgcccaaaagacttcccctactactttagggtactgaaaactcaaaggatcagctacagctttatctaagtatttactaaatgctacatgagggtgtccctgtccagctttctggcacatgagtcctgtgtggagagttacctcctcttccagggactgtgctgttgggaactttgggcaagtcacttacctctttgtgcctcaatttctgtataatatttctaagctacctcactgaggtggtatgaagattcactaatgtatgtagcgtgtttgtcaatcctccagtgaaaagcactatctagatcacattttggatcacattagccaaatgcagtaaatggccaaattagatgtgtgctgaagacaatcagtcactgggtctatattaaacagcaaccagagcaacaaatggcaaacaatttctattttcaagtttctttgcatatttttttggtgcaaaaccatttataaacttttttttctaacactagtgtctacagcagcattcaaaaaaattctgttaccttttctgtattaggatttaaagtctatttcttattgtatacctgattgaagctgttcttggagatgaatgttttaaatgtctatatccaaaaaataaacattttgatgtaactgtg

SEQ ID NO: 187 - DNA, 4437 bp, Homo sapiens
cgcgctctgaggtcaggccgaggacgcggacagccggggagccggggccgcgagacagaagggccggcctgggagcgggtggcgccggctggggaccaggcgtgcccacgtgaccgccccgcccgctgcctgcggcccgccgagccccgccacctccctcgggctgcagctcccggcgtgccccgcactctccgctgcccacccgctcgcccgcccctccttctcctcccagtgccacagagccgaagcccgagctgccgccgcagccacagccgagggcactatggtaagacgagcgcgctggccgggaggccgcggcgaggcgagaaaagccccccgcacggccccgggagtgaggccgccattttaacctgattttggcctccaaggtgggcgcttctgctctgcggctccgctgctctccagccgaccggcctgccctccggccgtcaggccctgccctgctgctctttggattttggggggcggggagggcccgggcgtcggcgcaggttgggggtcggggccgggcgggcgggggcgcgagagggtctgcggactgcagccgctcgcgccgcctttgcccttcgcttcctaattttacttaacacgcgaggctttaaaattggtacgtgctgcgaacgctgtgtgggtcagggtctggacggcctgtaataaaacccttacggggagattaaggaagagggaaaacactttttaaaatgctttctcgccgtaaaagcttttacactcgatcagttagttttggagtgtctgcatgtgagctgtgtgtgggccgtgggcggtttggagtttacacttgattctctttccttatgaggaaacgtcagtggctaggatgactttaaagaaaaaaatagtagaagcattaactgaaatccaaaagtgtttttttaaggccagccgagttgacacaatacagaaggtatttttgctgccactcctgaagctctgacatcacccagtgaaataggaaacatttcagggatgggacaacttgtatttgtccctttcgcttccacgtccaaacccctttaagaaggatgaatgggcaggatgagttagactccttcgctgtatcgtctactgattcttaaaatgtgacaaatctgattggacgacttacatggtacggtgcaatttttgatgtccagactaaagtgagtcttctctaggcaaacagtaattttggttaaaaccaaaatacgtgttctgaattactgttctgtgtttattttcaggcttctggagttacagtgaatgatgaagtcatcaaagtttttaatgatatgaaagtaaggaaatcttctacacaagaggagatcaaaaagagaaagaaagcagttctcttctgtttaagcgatgacaaaagacaaataattgtagaggaagcaaagcagatcttggtgggtgacattggtgatactgtagaggacccctacacatcttttgtgaagttgctacctctgaatgattgccgatatgctttgtacgatgccacatacgaaacaaaagagtctaagaaagaagacctagtatttatattctggtgtgtaaaaacaaaagaaaaaagtacttttaaaatgcaaggattattattatcatagtcagtcttacctttgtttttcttataaatgggattcaataattttttttttttctgtagggctcctgaaagtgcacctttaaaaagcaagatgatttatgctagctctaaagatgccattaaaaagaaatttacaggtacaaacttgaatatttggggcagagaaattattctttattaattataataaagtaataggataatgttttttctttttaggtattaaacatgagtggcaagtaaatggcttggatgatattaaggaccgttcgacacttggagagaaattgggaggcaatgtagtagtttcacttgaaggaaaaccattataaaatgacagtcaagtgccatctggatcttaaggagcttccatttctccagctcagtccattggaatagtattaggttttggttttttgttgtatttccccctttccactgggcccttccaacacaatgaatgaaggaaatatcatttatttaagcagcctatcagtgattgccattagactgttgaatactgttacttttatatagaacccaaggaatgccttcctgtcatattttagccaaaacaactggttatatgcctcccttgcagcaagcactacaatgtatgtgatcgtcaatgtgaatagcttagaatactgcaaaggataagctaattgaatgccttgaaagtattatccactggtcagatggtcaacttttttcagtattatttatagttggcacttgattgcagttctgtgaggcttgagcattcatacacctcacctgccttggcaagcctattttagtgatatggcagcacggatataacactatgcattaaaagcactttttgtaataagtttaatatcctaaaaggaatgccaattaagttttgttaactgtgtcatcaacttatcctagtacctcagtgttcattcctgttacctgcatatcttcttaaaagaaatagctgttattaatgcctttttgttttccattgagtgtacactactgaataagtgtaggagttttatgtttaccatgtgagtcctgcaacactaaagatattttgaatatcagtcatgatggcaatttctgtataaaagagccttaaatggaacattgttttgagatcaaactccccaccctcacaaaaatggccacgttgcaataaaaattgtggcatattacagaacgttgccttgttttccttggaaattttgcaaaatgttatgtgaaacaacttctagggtaaaaacagctattactaatctctgcactggtcatttgagaattttttttgtacagcattcatgtgtgatattttccagatttgttggatctatttggtttaaaaagtattctatcttaaggccaactaatataaaataccattgttaaagaatggtacttttataaacattagtgtatttatttcctatgtgttaatatgaagatcagaaattattttttgcactttggcataaatacttttcaatatctgatttgttctctggataaattagcatagttatttttttattcacatttacatttctaagtagttgtatagtagaagcaggaagctcttattgcttatttggtcgtaatgaaaataatttgtaaaatgtcctttaaaagtttaatgatacttctgatgtttcggaacagtcatttcacctactatttctgaatatattttgcaaattgaattggaataggaattgataatagcagtcttaaacattagtagtgggatttggctatggtccagactgtgctccttatagagaatttgatctgctcagtgtgagcggtttgctgttagccagggctatttatggcaaacacatgcttttgtatcttgtcatagttatccacaaatggcaaaactggacttgattctactggtatgcaaaacaggcatgctagtaagcagtcagtcgtggctcagaacttaaccccatagctcagaggaatgcttttagcagaaaacaggaaagaaaatatcccttaaaaattttttttgaatgtgtggaagtaattttagtataattagattttttccatatttttgaaagatttttcagatgtgaacattaaaaatagggattaaatgtctaggcttccatttaaaattatatgaatggtttgggatctttttgcactgagcaattttatttcaggcttccagctgtccctgtgagttatcctggacatttcgatggtttttggtaaggccaaactctgataagcaaaacagagaatactgacgtatacttaaccatatgtgtaactgatacttggcaccatggaatttttcattgagttatttcctcattcttttaaaaaataagggactataaatcagttatgtagtatcttttgtttttgtagctgattccttaactttcttgtatgcctctagtaatttcagagattaaatattgctttaaactgtgatactttgatttgctagattgacaaaactgatactaatataattaagttcatctttgaaatacatctttgtgcgtagagccaaaaaaagagataaaattaataatagttcacttgttatttgagattaatttggcatttgaaatgatcattttattttacaatcatttataatgaatcaatgttccagttagctttaaaaggtatacggtgctaattagtaaaatattgaaggcaatattttactgctagcttgcaaagttatgagagtttaaaaaataaaatatatgaaaatatgtaaagctgttgagatgtgtttacttatacttcagaacattaaaagtttaaaaactggt

SEQ ID NO: 188 - DNA, 72880 bp, Homo sapiens
tggcttccttgtggttcctcagtggtgcctgcaacccctggttcacctccttccaggttctggctccttccagccatggctctcagagtccttctgttaacaggtgcatgggggtggggtgggggactctgggtggggaggagggtaacttttgggtctgtcataaatagagggcccagaatatgtaggagtcagtctggggagaggcaaaggggatttggggaaggagaaagggttcaagaagaagcagggagaacagctagacccagacaggctggccagggaagcctggatgaatgaccacattcatggactgtgcaaggctgcttgccggtccccttgcttcacacatgaggagacggaggcccagggaggagaagtgacatggctcagggtgcgcagcaggtgtgagacccctttcctgagtgcttcctcctggatcccctctcaccatctccactttgcctccggttctattttccaaggtcccgggtgcaaatgtttgttgaatgactgatgaatgaaaatgatttgagtttgttaccttttatgcttatatgttgtggaaaatgaaattctcctcaaaagggaaggaaatacttgagagctgcataggaaggaaattatctaattaagaatgtatagaaacttcactgttgggcaaatcatcgttgtgacaccgggggaagaagccatttaggtgctcagaagggaggctggaattcagagcaggactggacgtgccccacgacggtggttcttaggtcaggagtcagcaaacagtggcctgggggcccgatatggcccacgacctgtttttgcacaacctgccagctagagattgaagatgaacactgataatcgatttgatgatagggagcaccacccccaaagaattctatttgtctcatttgtaaacccgtattacaaacaaattgtactcaatcattatgtttgaaatttccctaatgacaaatttgtggaaaagtattttctgtcttgttatataagtacttgtacaacatattctatcagcctcttggtctgcaaaacctaaaatttactatctggctgtttacagaataagtgtgctaatccccgccccaggctaacagagctggacctgggaggcagacatctggatgctgggttagttagggtgaccgaatggatgggaaagggaatggagcaggaagacatgctgctatcttttttttttttttttttttttgatacagggtctttctctgttgcccaggctgtagtgcagtggcatgatcatggttcactgcagccttgacctcctgggttcaagcaatcctcccacctcagcctcctgagtaccactacacccggctaattttttattttttgtagagatggggtctcactgtgttgcctaggctggtcttaaactcctgagcccaggtgatcctcccacgtcagcctcttaaattattgggataacaggcctgagccaccacacccagccattgctttcttttaaattattattagtttttgttttttttttgtatttaattttgagataggatctctctctgttgctcaggctggagtgcagtggcacaatcagggctcaagtgatcctcctgcctcagccctccaaagtgctaggactacagcccctaactggcatgctactttcctctgcttgatccttcccccattctccctttagccttgaccttatgtcatgggttcaacttggacactgaaaacgcaatgaccttccaagagaacgcaaggggcttcgggcagagcgtggtccagcttcagggatccaggtgagacccttagatggagccccctttctcagtgctttctctccaagacttacatacctgaaaaaaatcagcgatttgagtgatctttttcaacagataaatcaattcaaaatatacaacaaattcatcttttgaatttacagtattctaaattcaaaagatgcaaaagggtgtaagagtaaaaatctcttccttactcccttcccctagttcccttcccaggagggacctcacaaatggtttcctgggtgttccttcggggagactctgtgtgtgcataacacatacacgttccctccctcagccaacacaccatgtgtagtatacattgtactgaaattaaggcctgcctgcaggctgccgcctatttttgtgaatgaattttattgaaaacaactccgtccacttgtctcttactgtttattgcccttccctcccttcctcccttccttccttccttccttctttccttccttccttcctccctctctcattccctgcttccctctttccctccttccctcccttccctcccttccatccttccttccttccttccttccttccttccttccttccttccttccttccttccttccttccttcatttctttctttcctttctgacatggtcttgttctgtcattcagcctggagtgcacaggtgaaatcatagctcactgtagactcaaactcctgggctcaagcaatcctcccaccttagcctcctgagtagctgggactacaggcatgtgccaccacacctggctaattttttgattttttttgtatagacgaggtctcactctgttgcccaatctggtctcaaactcctggcctcaagtcatcctcttgcttgggcctcccaacttgctgggatgataggtgtaaaccactgtgcctggctatggccacttttgagctgtaatggcagaattcaggagctgtgatagagattgtatggaccctgaagcctaaaacatttacctttacagaaacagtaattgtggaggtgatagtacctttccagaagaagggggctggtctctgctctttgctttatctcccataatacagcccagtgatttgagtccattaatcccatgttatgcttgcattgcatgccataattgggagatgctataatttattttattttatttttttagagactccctctgtcgcccaggctggagtgcagtggcatgatcttggctcactgcgacttctgcctcctgggttcaatcgattctcctgcctcagcctcctgagtagcttggattgcaggtgcctgccaccacgcctggctaatttttgtatttttgtagagacagggtttcaccatgttggccaggttggtcttgaactcctgagctcaggtgatccacctgcctcggcctcccaaagtgctgggattacaggcttgagccaccgtgcctggcttgtaatctccttttacattacattagatctcttgttaatgaacatttagattgttcccaaacttttgctctatgaacaatgctgtcattttgcacatgtgcaagcctatttggaagtaaaggctaggactgggattgtggtatccacgggtgcatgagcacgtgcaattttaatagatttttccagatccccctctacagtggtggcagcaatttacactcacaccagaaattcatgaaaatacctacttcctcatactccctcactcatttgccaactcagtgtgctatcaaacttactgatctctgcagatcgagtaggtgagaagtggtatcttaatttagctttaaattgcttcttttttttttatgagagaggcattttctgtgaacatgtttttcttatctgttggccatttttctttctttttttttttttttactagtttgtacaagctttgagtacactgaggaaagtagtctggggtatgagttgtgaagctctctcccttgtgtattatttttcttttgagtatgcttatggtagtttatcacatacaaaaatttatttatttatttatttatttatttatttatttatttatttatttattgagatggagtctcgctttgtcgtccaggctggagtgcagtggagtgatctcggctcactgcaacctctgcctcctgggttcaagcgattctcctgcctcagcctcccgagtagctgggactacaggtgcgtgccaccacgcctggctaatttttttgtatttttagtagagatggggtttcaccatgttagccaggatgttctcgatttcctgacctcgtgatccacttgcctcggcctcccaaagtgcagggattacaggtgtgagccactgcgcctggcccagaaatttattgaaaatgactgtgtggaggctgggtgcaggggctcacgcctgtaatcccagcattttgggaggccgagctgggctggtcgctggaagccaggagttcgagactaccctggccaacataaggaaacctcatctctactaaaaatacacaaattagccaagcatggtggcacacacctgtaatcccagctactcaggaggttgagacaggaggaatgcttgaacctgggaggcagaggttgcagcagtgagccgagattgcaccactatactccagcctgggtgatggagtgagaatctgtttcaaagaaagaaaataaataaaaataaaaataaataaaatgactgtgtgggccgggtccagtggctcatgcctgtaattctaacactttgggagactgaggtggaaggattgtttgagcccaggaggcagaggttgcagtgagctatgattatgccactggactccatcttgggcaacagggtgagaccctgtctcaaagaaaaaaaaaaaatggttggcctgggactacaggtgtgtaccaccatacctggctaatttttaaaaacattttttgtagagatggggtctggctatgttacccgggctagtttcaaactcctggcctcaaatgatgctcctgcctcaacctcccaaggtgctgggattaaaggcatgagccatggtgcccagcttgaattgacctatttttatttttaaaatttattcatttattttttgggacagagtcttgccctgtctctcaggctggagtgcagtggtgctatctcggctcactgcaacctctgcctcctgggttcaagcaattctcttgcctcagcctcccatttagctgggattacaggtacgcaccaccacgtgtggctaattttttgtatttttagtagaggcggggtttcaccatgttgcccaggctgatcttgaactcctgagctcaggcaatccacccccttggcctcccaaagtgctaggattacaagcatgagccaccgcgcctggtcctatttttaaatgacttctggtttttgtgtcattcttaggaagaccttttctcattctgagtcttaacattttcccatttttttctttgctaattcttcctcctagtcataggaatttaggaatccgggtatgggcccccaccgtcctctgggtggcagaacttcctctgtggtctccttctctccccacatgtcgaagttttctctgttcccacttctccccacagggtggtggttggagccccccaggagatagtggctgccaaccaaaggggcagcctctaccagtgcgactacagcacaggctcatgcgagcccatccgcctgcagggtgagtcactgccccgccgggctgggactgggattcccctgtgaacacatagggactttccaggcactcctgtgtcctggggatctgtggtggggacacaggtgcctgcctccgtaccctctcctctgcctgcagtctctaccctagacatccccaggcaacccctctgtgttcctttctttcccaagatttaggatcccccttcaccgtcagacctccttgtctcccgcatggaggtgacccctgcccagctcttccacagccttctctgtccccccaccagggtgaccatgcccatatctgtccccgcagtccccgtggaggccgtgaacatgtccctgggcctgtccctggcagccaccaccagcccccctcagctgctggtgagtggggctcgatcagaggagcatcctaatgggggtgtttgggggcccacgcatggtggggctgggggtcttgtggagggtggaggtgctggggtacaaggacaggaagcaggggcagccccttccactggctcctgtcccctaggcctgtggtcccaccgtgcaccagacttgcagtgagaacacgtatgtgaaagggctctgcttcctgtttggatccaacctacggcagcagccccagaagttcccagaggccctccgaggtgggttgcctttggcagagggaacagatgcgcagcaaaagaccaggggagggggcaggactgaggtgacgtctgctcaaggtctgggctctgggtgcagaagagtgggggaactgggtcccattagagtcagaagctagggaggtgctagggtcttgtactttaggaaaacgccttggctaggcacagtggctcatacctgcaatcccaaagctttgggagcccaggagcttgagatcagcctgggcaatgtagtgagatcctgtctctaaaaaaaaaaaaaaaaaaaattagctgagtgtggtgatgagcacctgtagtcttagctatttggaggccaaggtgggaagattgcttgaggccacaagttcaaggcaagcctgggcaacatagggagatccccgtctctacaaaaaaaaaaaaaaattagccaggcgtggtggcacacacctgcagtcccagctactcaggaggatcacttgagcctgggaagttgaagctgcagcaagttatgattgcaccactgtactccaacctgggtgacagagcaagaccctgtctttaaaaaataagtccaggtcacactgcagaggaggggatggtgcaaggtgtcattggcaagaggtgggaatcttggggaccatcctggggggcggccttccacacccctgttccccaaacctctgttgattgagattctgagtgactgtatggatttttttttttttttttttttttgaggcagagtctcgctctgtcacccaggctggagtgcagtggcacgatcttggcttactgcaacctctgcctcccaggttcaagcgattctcctgccccatcttcccaagtagctgggattacaggtgcccgccaccacacccggctaatttttgtatttttagcagagacggggtttcaccatgttggccaggctggtctcgaactcctgagctctggtgatctgcccaccttggcttcccaaagtgctgggaatgagccagggaatgagtggggggcatgagccaccatgcctggccagagtgcgtggatctttcaagctgctttttcccactgctttgttcgatggctatgccatctttttgcttgtcttcatgttgattctgggaccacaggcgaatgtttctcccttgcattttttttctttctcaagccctgttcctctatatttcaccctccacagttaatcctccttcctccacagagaaaacaaaagcttcaggcatggactccctccactttccccttctcttattttatcttaataagcggttttccagtcttcactggaatttgttgacaaattctaaaggagctgtaacaccgcactttctcctttttctcaaatttccataatgacagcactcctggcagtgactcactcgttttagaggaagacctgtctctcctctgtcccatgactaaattcttccatatgggcttttgagagtctctcatgcaccaactaaggtgatcacctatctttcttttttcttttttttttggagacagggtcttgctctgtcacctaagctggagtgcagtggcacaatctcggctcactgcagcctctgcctcctgtgctcaagaaattcttgtgcctccgcctccagagtagctgggatcacaggtgcgcatatactgatttttgtattttttgtagagatggggtttcaccttgttgcccaggctggtctcgaattcctgggctcaagagatcttcccacctcagcctcccacagtgctgggatcacaggtgtgagccactgcgcctggcccagcatctcttgaatcacttgttttctctctaggacaattaacttcccccttcctctggctgtaaacactcttcattctatctgtatctgaaaagcaatcaaccaccacaatcgatagccatgaaaacaatcttctctcttccagtctcctcctcatctcctgccatctctcctcaccctcaccacccaagcttcctgagtgcattctcttcacccccggctggcctccagcttccctctccacctaggggcactgggttctgggttctcttttcacccacgtgttcttctttcctgaaatcacccagttctgtggcttcagctaacacttctacctctccctctttagacctcactctcagggttcaagactacttctttaaaaaagttttcatttattaaaaaatatataatacatacacttggttcaaaattcgaaagggtgcggtagctcacacctgtaattccagcactttgggaggtcaaggcaggaggattgtttgaggccaggagtttgggaccagcctagacaacataatgagaccccatctctacaaaaaatgcaattagccaggcatggtggcgtgtgcctgtggtcttagctattcaggaggcctcccaaagtgctggggttacaggcatgagccactgtgccctgccagtctttctaaaatacaaaacaaatcatctcacttccttttctaagaaccttctgtggctccccattgcctacagataaagtcgagctccttattggagtagaaaggcccttgcccgctgctctttgcttgatgccaccgctgtgtctccatcgccgtcacatacgtttgtccctgtagtgctgtttccatcaaacggcattcctggattctgccagaatccttttgaggcccttgtcccatatatcagtaggagtctcaactgggaccaaaagcacattccagtaatgtaactgcccaaggggttcaccttgcttgctgcctagacagagccgattcatcaagacagcagaattgcgatagagaaagaataattcacacagagccagctatgcaggggaccagagttttattatcactcgaatcagtctcctcgagcatttgggggcagagtttttgaggataacttggtaggtcgcgggggaagccagtgagctgggagtgctgattgatcagggatgaaatcatcgggagtcggagctgtcttcttgcgttcagttggttcctgggtgggggcagcaagatcggatgaaccagtttattgatctgggcagtgccagctgatccatcaagtgcaaggtctgcaaaatatctcaagcactgattttaggagcagtttagggagggtcagaatcttgtagcctccagctgcatgactcctaaatcataatttctcatcttgtggctaacgttagtcctacaaaggcaatctagtccccaggtaagaaggaggtctgctttgggaaagggctgttacgatctttgtttaaactataaactataaactataaactaagtgtctcccaaagttagctcagcctacacccaggaatgaacacggacagcttggaggttagaagcaagatggaatcagttaagttagatctctttcactgtctcagtcataattttgcaaaggcggtttcagtaagatttatttacaaagaggggggtttatttataaagggagtaattataaagctgtgacaggcctaagggagccatcagggactttccaagccctgggcaagcaggtctgttgccacccctgggtttatgggttgaggagagggagagctcaccagggtctggagagagtcatgtggagctggcttccttctgaggaacagttggtcttttgtgaaggacatagctgtccccaaacaacctcaatgggagaacacccggacctcactgccctcctccctctagtcttctgttgagccccctcatctgccaaatccaatgggaatccagagggcaacagagtcctggtgatggggtccctgcaggttgacctcccaggccacagagctgagcggcaatgggtagaaagtggatttggggatggggcagaaggcagaggagcacattccacatcactttatatgtgtgtgcccttcccttttctagaatctactccttttgtatatctggcaaatccttccttccttccttccttccttcctcctttgctttcctttcctttcctttcctttcctttcctttcctttcctttcctttcctttttttcttcctttcttccttttcttcgaagtcttgctctgtgacccaggctggagtgcagtggtgcgatctcagctactttttgtatttttaatagagatagggtttcaccatgtcagccaggctggtctcaaactcctgatctcaagtgatccacctgcctcagcctcccaaagtgctgggattacaggtgtgagccacctcgcccagctgggcaaattatttcctgttcttcaagattcagtcaaacatcaccacattccctgattcccttgggcagaattaacgaaaattttccataccactttgtccttgtttatttacttatttatttatttttaagagacagggtctttctctgtggcccaggctggagtgcaatggcgtgatcatagctcactgaagcctcaaccttttgggctgaagtgatcccccaccctcagcctcctgagtagctgggactacaggcatgtgccaacatgcctgactaatttttaacgtgtgtgtgtgtatatatatatatatatatatatatatatatatatatatatatatgtttttaacgtgtgtatacatatatatatatacacacacgttaaaaattatatatatattatacataatttatatatatatttaacatctatattttttatagagacggggtcctatattctcattgttcagcagagggctgacatgcaaaaaaacccaaaacaccaagtgtcaaattacttgattcatactcttttccccttccccagggtgtcctcaagaggatagtgacattgccttcttgattgatggctctggtagcatcatcccacatgactttcggcggatgaaggagtttgtctcaactgtgatggagcaattaaaaaagtccaaaaccttggtgagggcccaggggtaggttagggaagagcccacacggggctggaagatacatggcaaccgggccaccatgttctcctcccagttcaactgcagacattgccaaattgacgatcgattatggtttgccttcctgagtctcttttctgctctgttggatgcagcctcagcattctttcagccttttataaagcgggcagctctaattgttaaggttggcatgggagatgaagcccacgtgtcattgctggctgagttctattttcatttttatttcttatttttttgagacagaatctcactctttctctcaggctggagtgcagtggtgtgatcttggctcactgcaacctccgcctcccgggttcaagcaattctcttgcctcagcctcccgagtagcggggattacaggcgcatgccaccatgcctggctagtttttgtatttttagtagagacggggtttcaccattttggccaggctggtctcaaactcctgacctcaggtgatccacccgcctcggcttcccaaagtgctgggattacaggtgtgagccactgctcccggccgctggccgtgttctagtattgaggagagatgggagctgctggcagctctccgtcctggtgaggcaggggattaggggcagcacagaggaggaatttggagagtggagtgtttaagatcttcgtggagcttgctgggagatgtctgaggggtgggggcaccttctccagcatcacaccagccgccccctccgcagttctctttgatgcagtactctgaagaattccggattcactttaccttcaaagagttccagaacaaccctaacccaagatcactggtgaagccaataacgcagctgcttgggcggacacacacggccacgggcatccgcaaagtggtgtaagcttccccttttcccttaggatggagggaggaggagacacttttagctgggctttgatggatgaagggagccgttcagacaggggtggtagaggatgcttccccaccggcagaggtggggaggctgtgcgtggtgtgttcatcaaaggacaagttgtgagtgaaaggtgggagtggagtggggaagtgagggaaaggtgtctggagggaagctacaaagatcagctcaggccagggagccaaaggcagctttacagcctgtggtgagatatcgccatgtctcattttgggaagttcactctgattttgaggtgggtgtagaggcaaggatggggttgggacagaagtacaagaagcactggagagtcctagaggggctggggagctggtgcagtgctctgggagaggtttcctgaaggccaattaactatatatatatatatatatatatatatatatatatatatattttttttttttttttttttttttttttttttttttttgagacagagtctcactctgtcacccaggctggaatgcagtggcctgatctcggctcactgcaacctccacctcctgggttcaagcaattctcctgcctcagcctcctgagtagctgggattacatgcgtccatcaccaccatcagctaatttttgtatttttagtagagacagggtttcaccatgttgaccaggctggtcttgaactcctgacctcaggtgattcacctgacttggcttcccatagtgctgggattacaagtgtcagccataaatatatatatttttaaaattcaaaagtaataatactcagttaaaaaacccaaattatgcgaaagtataaaaacaaaaaccgtgaaggcttcctttcccttccctgctgcttttccaggtctcggggcagttgcatctcagtgctaagtctcaggggagacggagcccctccgagacctcgcctagctgtatctgtgtctgggactctgctgacatttcctttctgacgttaatagcatctctggctaggtgcagggtctcataccagtaatgtcagcactttaggaggccgaggtgggaggatcacttgaggccaggagtttgagaccaattgacaacatagtgagactctatctctaaaaagataaaaaaataaaccaagtgtggtggtacatgcctgtagtcccaggtactcaggaggctgaggcaggagaatcacttgagcccaggagttcaagtctgcagtgagctatgattgtgtctctgcactccagcctggataacagagtgagtgtctatttcttaaaaaaaaaaaaaaactagtgtgtcatctacttgcatttgactttgtccctcctgtttcctgcacagacgagagctgtttaacatcaccaacggagcccgaaagaatgcctttaagatcctagttgtcatcacggatggagaaaagtttggcgatcccttgggatatgaggatgtcatccctgaggcagacagagagggagtcattcgctacgtcattggggtagggaatgcagctctcaggttgatgcttctgtggagggtttctatgtggatccatcctcccttcaatttgcaaatattattaaaatcaaagtgacatgagagctaatgctagctcatatacaccgtatcagctatctgttgccacatcaatgctgtgtaataaactatcccaaaattcagcagcttaaaataataagtaagcctgtgggtcagcctgccaagagttctggtctcaatggccttcctcactgtcattagctacaggttggcaggctgctctgctgatcttggccaggctctctctgtttctgagggttgccagctatgtcatctgctggaccagatggccttgggtggaaccactggggtgacttggccctttggcaacctggctctcattctccagggctagcctgggcatgtcctcatggtgaaggcaggggagcaagagaacagtggagatgttgcaagtgcttttttacgcctctgcatcatgtttgataacatccatgggtgtcacgagcagtgcaaggttagcgataaccaggtccatgcaggtttgtgtttttccacaacatctttcgctgatgctatttcaatcacaaacgccacaagctgcatggaattcccaaggaggcagttcttcttagtgcatcctgttccctcagacactctggctcaagccacccacaagtcagtcaatattgcaaaccatatataatagtatacttaatcaatatataagttataggttaaacattccacagcaaacaaagtaacatttaacatcagaagaaaaagaaagaggagaaaggatgaatgaaaaggactcctggtctgggcccaagggtcctggtcctgttagtcttgcaaggcagagtctttgatacggcagagccctcggcagcaaatgccaggctctcatcatgagcgactgcgaggtgtgagttccaacagctgctttgagctgctgaaggcctgatctcttctagtcacagagctgtctggtgagaacagacagagaagaatgtgcttgtttgcatccttatctggttggatgtagtctttatttgtttattttatttatttatatttatttatttatttattttgagactgagtcttgctctatcgctcaggctggagtgcagtggcatgatcttggctcactgcaacctccacctcctgggttcaagcagttcttgtgcctcagcctcctgagtagctgggactacaggcatgcaccaccatgcctggctaatttttgttttgtattgttagtagagatggggtttcaccatgttggccaggttggtcttgaactcctgatctcaagtgatctgcccgccttggccttccaaagtgtgggattataggcatgagccactgcacctggcctatttaaaaaatttgtttaaaacgaccttatccttgttggcaaagtgccctgtgaaatatagaatggagcctttttctaagatggagtcagttatgtcaagggtgctctgtatacaatgggctaaagcaagactcatgtctgagcccagaggcaatgaagggggcagatgactccaccaagagcaggagggcacagcagagtgctgggggaaagggcttggatacaggaagaggcaaggagtcaggatcatcagtgtaatcaaactactacagcacctgcatgacacagaaagcgatatcaccatggatacatgccttggcacgtaggacataccttcatataaagaaaaaggctccccttcctctagggggaggtcagctccataccaggagacgtggcacagcagatggatcagcagccgggtttctgccccaacttgcttccttggcacagtgccttgtgcagtgtacaacctgcccaactatacctggcaaccctgtcccagggaccttctgatgcatttcctcacttgataaataatggttcagactagtttcctgcagaattgtctttgccagatgatattgctagcctcacaccatgatttagcctctgttccttggtaacaggtgggagatgccttccgcagtgagaaatcccgccaagagcttaataccatcgcatccaagccgcctcgtgatcacgtgttccaggtgaataactttgaggctctgaagaccattcagaaccagcttcgggagaagatctttgcgatcgagggtgagtcaggcatctgtgttcccagagcagctccagaggcagccccccaccccagaacatagtcccctctagaatccagaccttcctaacccttggtatcccccagcatcaactctctccacttcctacagctcccagtcccagcctcacttggtcaattcctttgaagtcaaagaatccatacttttatctgtaattttgcaaatcttggctataggctggtaaattggagtatgggggagtcaaatcccacccagtattttaacaaaaatttggatgtgttgccagctgtcgtctgttcggttctctgttgtatcccaattgcctagaatagtgcctggtactcagaaggtgctcaataaatgtttgttgaataaaaggaatttagaaattgggggatttcataaacagtctgggtttatggcttatcttgaaaagctggaagattagacaccttgaagaccgcattcccacttggcaggatgttgctggaggtgaatggctgccatccttctaagagggacgtatgctgtccagcttgacacagatcctgtcggagtctcctttgtctgtggccaccagagcacttgggttttcagtacctgttctaggttcttctgctttcttttcttttctttctatttttttttgagactgagtcttgctctattgcccaggctggagtgcagtggtgcgatcttggctcactgcaacctctgcctcccaggttcaagtgattctcctgcctcagcctcctgagtagctgggattacaggcgcataccaccacgcccagctaatttttgtatttttagtagagacggggtttcaccatgttcaccagactggtctctaactcctgacctcaagtgatctgcccatctcaggctctcaaaatgttgggattacaggcgtgagccaccatgcccggccttctgctttctttaatatagaaacttctcctctttacaggtactcagacaggaagtagcagctcctttgagcatgagatgtctcaggaaggcttcagcgctgccatcacctctgtaagtggcccttcattaaattgcgggggtggggcagggggtagcaagaagagataggagagatgtgggggtttggggactcttctctgtgatagatacttgggaagtagctctgtgaggggcagcggttgtcccttcttccttcctcatcaaccctgttctacacctttcccagaatggccccttgctgagcactgtggggagctatgactgggctggtggagtctttctatatacatcaaaggagaaaagcaccttcatcaacatgaccagagtggattcagacatgaatgatgcttacttgggtaagtggggagggcaagggttactctaagaaggggtgaggatttggcataagtcaactagcatagatgtctgggtcttgaatgaatgggatacatatgtatgggatactagctattagtctcttgggatagctttaaagacagaaacttcaatttttttttttgaggtggagtttctttcttgtcgcccgggctgtagtgcaatggcactcggctcactacaacctctgcctcctgcgctcaagcgattctcctacctcagtctcctgagtagctggtattacaagaatgcaccaccacccctggctaatttttttttttttttcgaaatggggtttcgctcttgttgcccaggctggagtgcaatggcgtgatcttggctcaccacaacctccgcctcccaggttcaagcgattctcctgccttagcctcctgagtagctggaattacaggcatgtgccaccatgcccagctaattttgtatttttagtagagatgggatttctccatgtcggtcaggctggtcgcgaactcccaacctcaggtgatccacctgcctcggcctcccaaagtgctggaattacagacgtgagccaccgtgcctggtctttttttgtattttcagtagagaccgggtttcaccatgttggccaggctcgtctggaactcctgacctcaggtgatccgcctgtctcggactcccaaagtgctgggattataggtgtgagccaccgcacccggccagaaacttctaaattgaattgtaattatgttcataaagagaaatatagcgtagggatcagttaccccaacacagcaagcgtggggctgccccagtgcccctactcaaggggtgggtctgcatggtggaggagggggcagggaatgcacttcacctctcagacccccaccttcaggttatgctgccgccatcatcttacggaaccgggtgcaaagcctggttctgggggcacctcgatatcagcacatcggcctggtagcgatgttcaggcagaacactggcatgtgggagtccaacgctaatgtcaagggcacccaggtgagtgcggtttgtggagcatgaatgtgcaaacagaggcgccctggggtcttagagattccaggaggggcattcagatgacatgcatggccctcttgtaaaggaggctttgggggctgtgagctggggagttgtgggatcagcttagcatttgtgaatgctgtgtcctcagcttttttaacaatgataaataacaatgcttgcctgtacagagctctctatgggtctttctgtactcagggctggtattcaacccgtatataaccaggatagccatgttagttaataaaatattgaaacaattccgtattcattgataaatggtggattccccctcacccatgcactctggtgcttccccagtctctgtgggcttccccatgatccagcaactatgaggtcaggcaggacacttcacacaccctctaggatctgctccagccatgcccctgctcagtacctgtgcagctccagctgttcattattttgaatatcacccctgcaaaagcagcatggtcacatattatgtgggaactagcgagtgaggcaaaactctctagtcaaaatcattcttgcaaattcctgaaataggactgcacccatgatatggtgcctatagttctttattttatttttattttattatactttaagttctagggtacatgtgcacaacatgcaggtttgttacatatgtatacatgtgccatgttggtgtgttgcacccattagctcgtcatttacattaggtatatctgctaatgctatcccttccctctccctccaccctacgacgggccctggtgtgtgatgttccctacctggtgtccaagtgttctcattgttcaattcccacctatgagtgagaacatgcagtgtttggttttctgtgcttgcaacagtttgctcagaatgatggtttccagcttcatccatgtccctacaaaggacatgaactcatccttttttatggctgcatagtattccatggtgtatatgtgccacattttcttaatccagtctatcgttgatggacatttgggttggttccaagtctttgctattgtgaatagtgccacaataaacatatgtgtgcgtgtgcctttatagcagcatgatttataattctttgggtatatacccagtaatgggatggctgggtcaaatggtatttctagttctagatccttgaggaatcgccacactgtcttccacaatggttgaactagtttacagtcccaccaacagtgtaaaagtgttcctatttctccacatcctctccagcacgtgttgtttcctgactttttaatgatcaccattctaactggtgtgagatagtatctcactgtgattttgatttgcatttctctgatggccagtgatgatgagcattttttcatgtgtctgttggctgcataaatgtcttcttttgagaagtgtctgttcatatcccttgcccagtttttgatggggttgtttgattttttcttgtaaatttgtttaagttctttgtagattctggatattagccatttgtcagatgggtagattgtaaaaattttctcccattctgtaggtggcctgttcactctgatggtagtttcttttgctgtgcagaagctctttagtttaattagatcccatttgtcaatattggcttttgttgccattgcttttggtgttttagtcatgaagtccctgaccatgcctatgtcctgagtggtattgcctaggtttccttctagggtttttatggttttaggtctaacatttaagtctttaatccatcttgaattaatttttgtataaggtgtaaggaagggatccagtttcagctttctacatatggctagccagttttcccagcaccattattaaatagggaatcctttccccatttcttgttttttcaggtttgtcaaagatcagatggttgtagatgtgtggtattatttctgagggccctgttctgttccattggtctatatttctgttttggtaccagtaccatgctgttttggttactgtagtcttgtaatatagtttgaagtcaggtagcgtgatgcctccagctttgttcttttggcttaggattgacttggcaatgtgggctcttttttggttccacatgaactttaacgtagctttttccaattctgtgaagaaagtcattggtagcttgatggggaaggcattgaatctatgaattatgttgggcagtatggccattttcacgatattgattcttcctatccatgagcatggaatgttcttcaatttgtttgtgtcctcttttatttcattgagcagtggtttgtagttctccttgaagaggtccttcacatcccttgtaagttggattcctaggtattttattctctttgaagcaattgtgaatgggagttcactcatgatttagctctctgtttgtctgttattggtgtataggaatgcttgtgatttttgcacactgattttatatcctgagactttgctgaagttgcttatcagcttaaggacgttttgggttgagacaatggggttttctaaatatacaatcatgtcgtctgcaaacagggacaatatgaataccctttatttctttctcctgcctgattgccctggccagaacttccaacactatgttgaataggagtggtgagagagggcatctctgtcatgtgccagttttcaaagggaatgcttccagtttttgcccattcagtatgatattggctgcgggtttgtcataaatagctcttcttagtttgagatacgtcccatcaatacctagtttatttagagttttcagcatgaagggctgttgaattttgttaaaggccttttctgcatctattgagataatcacgtggtttttgtctttggttctgtttatatgatggattatgtttattgatttgcatatgttgatccagccttgcatcccagggatgaagcccacttgatcatggtggataagctttttgatgtgctgctggattcagtttgtcagtattttattgaggatttctgcgttgatgttcatcagggatattggtctaaaattctcttttttttgttgtgtctcttccaggctttggtatcaggacgatgctggcctcaaaaaatgagttagggaggattccctgtttttctattgactggaatagtttcagaaggaatggtaccatctcctccttgtacctctggtagaattcagctgtgaatccgtctggtcctggactttttttggttggtaggctattaattattgcctcaatttcagagcctgctattggtctattcagagattcaacttcttcctggtttagtcttgggagggtgtatgtgtccaggaacttatccatttcttctagattttctagtttatttgtgtagaggtgtttatagtattctctgatggtagtttgtatttctgtgggattggtggtgatatcccctttctcattttgtattgcgtctatttgattcttctctcttttcttctttattagtcttgctagcggtctatcagttttgttgatcttttcagaaaaccagctcctggattcattgattttttgaagggttttttgtgtctctatttccttcagttctgctctgatcttagttatttcttgccatctgctagcttttgaatgtgtttgctcttgcttctctagttcttttaattgtgattttaaggtgtcaattttagatctttcctgctttctcttgtgggcatttagtgctataaatttccctctacacactgctttaaatgtgtctcaggattctggtatgttgtgtctttgttctcattggtttcaaagaacatctttatttctgccttcattttgttatgtatccagtagtcattcaggagcaggttgttcagtttccatgtagttgagcggttttgagtgagtttcttaatcctgagttctagtttgattgcactgtggtccgagagacagtttgttataatttctgttcttttacatttgctgaggagtgctttacttccaactatgtggtcaattttgtaataggtgtggtgtggtgttgaaaagaatgtatattctgttgatttggggtggagagttttgtagatgtctattaggtccgcttggtgcagagctgagttcaattcctggatatccttgttaactttctgtctcgttgatctgtctaatgttgacagtggggtgttaaagtctcccattattattgtgtgggagtctaagtctctgtgtaggtcactaagcacttgctttatgaatctgggtgctcctgtactgggtgcatatatacttaggattgttggctcttcttgttgaatttatcggtttaccattatgtaatggccttctttgtctctttgatctttgttggtttaaagactgtttcatcagagactaggattgcaacccctggttttttctgttttccatttgcttggtagatcttcctccatccctttattttgagcctatgtgtgtctctgcacgtgagatgggtttcctgaatacagcacactgatgggtcttgactctttatccaatttgccagtctgtgccttttaattggagcattgagcccatttacatttaaggttagtattgttatgtgtgaattagatcctgtcattatgatgttagctggttattttgctcgttagttgatgcagtttcttcctagcatcggtggtctttacaatttggtatgtttttgcagtggctggcactggtttttcctttccatgtttagtgcttccttcaggagctcttttagggcaggcctggtggtgacaaaatctctcagcatttgcttgtctgtaaagtattttatttctccttcacttatgaagcttagtttggctggatatgaagttctgggttgaaaattcttttctctaagaatgttgaatattggcccccactctcttctggcttgtagggtttctgctgagagatcagctgctagtctgatgggcttccctttgtgggtaacctgacctttctctctggctgcccttaacattttttcctccatttcaactttggtgaatctgacaattatgtgtcttggagttgctcttcttgaggagtatctttgtggtgttctctgtatttcctgaatttgaatgttggcctgccttgctagattggggaagttctcctggataataccctgaagagtgttttccaacttggttccattcgccctgtcactttcaggtacaccaatcagacgtagatttggtcttttcacatagtcccatatttcttggaggctttgttcatttctttttactctttttttctctgaacttctcttcttgcctcatttcattcatttgatcttcaatcactgataccctttctccacttgattgaattggctactgaagcttgtgcatgcatcacgtaattctcatgccatggttttcagctccatcaggtcatttaaggtcttctctatgctgtttattctagttagccattcgtctaatctttttacaaggtttttagcttctttgtgatgggtttgaacatcctcctttagctcggagaagtttgttattaccgatcatctgaagccttctcctctcaactcgttaaagtcattctccgtccagcttcgttccattgctggtgaggagctgtgctcctttggaggagaagaggtgctctgatttttaaaattttcagcttttctgctctggtttctccccatctttgtggttttatctacctttggtctttgatgatggtgacatacagatggggttttggtgtggaaatcctttctgtttgttagttttccttctaacagtcaggaccatcagctgcaggtctgttggagtttgccggagttccactccagaccctgttttcctgagtttcaccagtggaggctgcagaacagcaaatattacaaaacggcaaatgttgctgcctgattcttcctctggaagcttcgttgcagaggggcacccagccgtatgaggtgtaagtcggctcctactgggaggtgccccccagttaggctacttgggggtcagggacccacttgaggaggcagtctgtctgttctcagatccaagctgcatgctgggagaaccattactctcttcaaagctgtcagacagggacatttaagtctgcagaagtttctgctgccttttgttcagctatgccttgcccccagaggtggagtctacagaggcaggcaggcttccttgagctgcagtgggctccacccagttcgaacttcctggccgctttgtttacctactcaagcctcagcaatggtggacgcccctcccccagcctcactgccaccttgcagcttgatctcaaactgctgtgctagcgtgagcaaggctccatgggcgtgggaccctctgagccagacgcgggatataatctcctggtgtgccatttgctaagaccattggaaaagtgcagtattagggtgggagtgtcccaattttccacttactctctgtcacggcttcccttggctaggaaagggaattccccaaccccttgcacttcccaggtgaggcgatgacccaccctgctttggctcatactctgtgggctgcacccactctcctacaagccccagtgagatgaacccagtacctcagttggaaatgcagaaatcacttgtcttctgcgtcactcacgctgggagctgtagactggagctgttcctattcggccatcttggaacctcctctgcctatagttctttaaaaaaaaaaatttcaggcagggcatgttggctcatgcctgtaataccagtgtagcaggacaagctgcatacaaaacccctcagacaccgagttaaagaaggaagggctttattcagtcaggagctacagcaagactcacgtctccaaaaactgagctccccgagtgagcaattcctgtccttttaagggcttaaaactctaaacaggtccacgtgagggggtcgtgatcgattgagcaagcaggaggtacgtgactgagggctgcatgcaccagtaaacagaacggaacagaacaggacagagattttcacaatgcttttccataccatgtctggaatctatacataacataactggttaggtcatgagttgatctttaaccagacccagggtgcagcacagcccgtggatttaatttctgccttttagtttttacttctttctttggaggcagaaattgggcataagacaacatgaggggtggtctcctcccttaccagcactttggaaggctgaggcaggtggatcacctgaggtcaggagtttgagacgagcctggccgatatggtgaaactctgtctctactaaaaataaaaaatattaaaaaaagttagccaagcgtggtggcgtgtgcatctgtaatcccagctactcgggaggctgaggcagaagaatcacttgaacctgggaggcagaggttgcagtgagctgggatcttgccactgcactccagcctggatgacagggcgagacttcatctcaattaaaaaaaaaatttcaagttttagatttggggtacatgtataggcttgttacatgcatacattgcatgttgctgaggtttgggctgcagatcccatcacccaggtagtgagcatagtacctgtggtggtttttcttttttctttttcttttcttttctctctctttttttttttttagagacagggtctcactatgttgcccaggctggttttgaacacctgagctcaagcaacgttgcccaggctggttttgaactcctgagctcaagcaatcctcctgccttggcctcccaaaatgctgagattacaggtgtgaaccactgcgcctggcccaataggtggttttccaacccacacctcctgctcctccatctggtagtctgcagtatctatcattcccatctttatgtctatgtatacccagtgtttagctcccacttataagtgagaacatgcagtatttgattttctgttcctgtgccaattcacttaggattatagcctccagctgcatccatgttgccgcaaaggatgtgattcatttttttttttatggtggcgtagtatttgatggtgtatatgtaccacattttcttttccaatccaccactgatagacacctaggttgattccatgtctttctattgtgaatagtgctgtgatgaacatacgagcatgtatctttttgatagaacagcttattttcttttggatatatggccagtaatgagattgctgggctgaatagtagccctgttttatattctttgagaaatcttcaacctgctttccacagtggctggactaatttacattcccaccagccaacaatgtataagcgttcctttttcttcattgccttaccagcatctgttattgtctttttaataatagcattctgactggtgtgagatggtatctcattgtggtttatgatttgcatttctctggtgattagtgataatgaactttctttttcaaatgttttttggctacttgtatgtcttcctttgagaagtgtctgtttatgtcctttacccactttttaatggggttatttgtttcttgcttgttgatttgttgaagttccttatagattctggatttcagacctttgtcagatgtggtttgcaaatattttctcccattctgaaagttttctgtttactctgttgatagtttcttttgctctacagaaactctttaattagttcccacttgttgatttttgtttttgttgcagttgcttttgagggcttagccgaaagttctttgccaaggctgctgttgagaaagtatttcctaggttttcttcaatgattttaatagttcgagggctcacatttaaatctttaatccatgtgatttaagtctttaatcacatttaaatctttaatacaccttgagttgatttttgtataaggtgtaaggaaggggttcagtttcattcttctgcatatggatagccagttatctccacactctttattgaatagggagttctttccccattgcttgcttcatagtctttattgaagatcaggtggttataggtgggtggctttatttctgggctctctgttctattccgttggtctatgtgtctgtctttgtaccagtaccatactgttttggttactatagcctcatattcggatagtgtgatgcctccagctttgttatttttgcttaggattgcttttgctatttaggctctttttttgttccgtattaattttagaatagttttttctatctgtgaacaatggcattggtagtttgatacaaatagcattgaatctgcaaattgctttgagcagtgtggccattttaacaatattgattcttccaatccatgagcatggaatacttttccgcttatttgtgtcgtctctgatttctttcaacagtgtatttctctttgtagagaccttttacctccttggttagctgtgttcccaggtacttcatttttcgtttctgcctgtagttctgtgtgtttttaaaatttttgtcggtggttctctttgacttgtaattaatgcattgtatggggatgaaaccagtttctcctgatacctgaacagcttgtcataattctttgccaatagtcaaattcttcacgtggtctctctaaacacatactggccattgatggtgtcaatgcctgacatgtataagggatggggtggggaaaaaagtgtagaggaattacgggaagtcaagtgtggattggatgccacttctctgttttcggtgtgtggtcaggaccacatgaggaaggctggctggtcaactcccccaccccacacaagtacacgcacattaccatcaagggtgatagatgcttaaagtgggacagtctgggagttatgagagcaaatgggaggggcacccacagaaaggcagtatggaagccttcctggtggaagtggcagctaagccaaggcctgaggtggaagcacaagagaagtgaaaaggggtgtggggaagcaaggggccagaggagggagagagaatggaatggagggtcagaatatgcgtatagggtggtgggaggagtggtgggagaaaacaggaaagaagggtaggtgtggcttatcccagacatgcagggcttgttcaatatcccaaataccaatattgcagaaatggacaagctgatcctgaagtccatatggaaacagaagggacccatatattagacttatacctaaatgtttcatgacctttggcactattgtaaattgtactggtttttaaatttaaatttccaattgttggaacagaacagagccctcagaaataattccacatgtctacaaccatctgatctttgacaaacctgacaaaaacaagaaatggggaaaggattccctatttaataaatggtgctgggaaaactggctagccatatgtagaaagctgaaactggatcgcttccttacaccttatacaaaaattaattcaagatggattaaaagcttatatgttagacctaaaaccataaaaaccctagaaggaaacctaggcattaccattcaggacataagcatggtcaaggacttcatgtctaaaacaccaaaagcaatggcaacaaaagccaaaattgacaaatgggatctaattaaactaaggagcttctgcacagcaaaagaaactaccatcagagtgaacaggcaacctacagaatgggagaaaatttttgcaatctactcatctgacaaagggctaatatccagaatcatcaaagaactcaaacaaatttacaagaaaaaaacaaccccatcaacaagtgggtgaaggatattaacagacatttctcaaaagaagacatttatgcagccaacagacacatgaaaaaatgctcatcatcactggccatcagagaaatgcaaatcaaaatcacaatgagataccatctcacaccagttagaatggtgatcattaaaaagtcaggaaacaacacgtgctggagaggatgtggagaaataggaacacttttacactgttggtgggactgtaaactagttcaaccattgtggaagacagtgtggcgattcctcaaggatctagaactagaaataccatttgacccagccatcccattactgggtatatacccaaatgactataaatcatgctgctataaaggcacatgcacacgaatgtttattgcggctctattcacaatagcaaagacttggaaccaacccaaatgtccatcaacgatagactggattaagaaaatgtggcacatatacaccatggaatactatgcagccataaaaaaggatgagttcatgtcttttgtagggacatggatgaagctggaaaccatcattctcagcaaactatcgcaagaacaaaaaaaccaaacactgcatgttctcactcataggtgggaattgaacaatgagaacacttggacacaggaaggggaacatcacacaccagggcctgttgtggggtgggggaagggaggagggaaagcattaggagatatacctaatgtaaatgacaagttaatggatgcagcacaccaacatgacacatgtatacatatgtaacaaacctgcacgttgtgcacatgtaccctagaacttaaagtataataaaaaaataaatttccgattgtttagggatatagaaatacaactggccgggcccagtggctcacgcctgtaatcccagcactttgggaggccgaggcaggtggatcacctgaggtcaggagtttgagatcagcctgaccaacatggagaaaccctgtcgttactaaaaatacaaaattagccaggtgtggtggcacatggctgtaatctcagctacttgggaggctgaggcaggagaatcgcttgaatctgggaggcagaggttatggtgagccgagatcatgccattgcactccagcctgggcaacaagtgtgaaactccatccaaaaaaaaaaaaaaaaaaaaagaaatacaactgattcttacatattgatcttgtatccaaaacaatcttagaaaaggggaacaaagctggagggttcacactttccaattcaaaacttacaaagccatcaagccagaaagtaaattagtggtttccaggggctgggggttggactggggattggaaatactgctaacaggtagagaatttctttctgggaagatggaaatgttctggaggtagtggtgatgattacacaacattgtgaaggtactaaaacccagtgaaccttatactttaaaatggtaaattttatggtctatacatttaatctaaattataaaagctactttgaagaaaacaatgtgattcaccataacagcagattaaagaagaaaaaacatgtaaccacctgaacagatatagaactctaatttgacaacatacaacatcgtttcatgattaaaaatactctcagccgactaggaactaaagggaacttcctcaagctgaaaaagagcatttacaaaaaatctctaccaggcattatacttaaaagtgaaagagaatgcttttcacctaaaattggaaacaagacaagaatatctacttttataattcctatccaacattgtactgaaagacctagccaatgcaataaagcaggaaaaagaagaaaaaaaaatataaagaggaaaggaagaaataaaaccctctctatttgcagatgatacaattgcatggaaaattccaaagaacctataaaaaagctatgataataggttttttcagtaagttctcaggatataggagcaatgtataaaaattagttttatttctataatataattgaacaattggaaatttaaattaaaaagtaccatttacaatagcataaaataccatgaaatatttaggtataaatcaaacgaatcatgtacggtaactttatgctgaaaactacaaaacactaatgagagaaataaaagacctaaataaatggagagagacgctgtggtcatggattcgaatattatagttccaatattgttaagatgtcaattctccctgggttgatctacagattcaatgcagtaaaaatcctggataatattccattgtgcacatgtaccacattttctttatccattcatctgttgatggacacttaagttgattctatatctcgactattgtgaatagtgctgcgataaacacgggagtgcagttatctcttcagtatactgatttcctttcctttggcaatatacccagcactgggattgctggatcatgtggtagttccatttttagttttcttgaggagcctccatattgttctctatagtggctttactaatttacattcctactaacagtgcatgagggttcctctttctctgcatctttgccagcatccatcattgtttgtcttttcgataaaagcccttttaactggaatgagatgatatctcattgtggttttcatttgcatttttctggtacacaaaggaatattattcagccataagatgaatgaatcttgtgatttgcaataacaggattggaactggaggacattatgttaagtaaaacaacccgggcacagaaaaacaaatattgcatgttctcattcatgtgtaggagctaaaaaaaaatggatctcatggaggtagagagtagcatgatgggttactagagactgggaagggtagtaaggaggatggggtaaagaggggatggttaatgggtacaaaaatacagttaggaaaaataagacctagtgtttggtagcacagtagggtgactatagttaacaataatttattgtgtatttcaaaataactacaggaatggaattggaatgttcccagcaaaagaaatgataaatccttgaggcaacggatatcccagttaccctgatttgatcatcacacattgtatgcttgtataaaaatatcacatgttccctataaatatgtgcaattattacatattcataaaaaggtaaaaatcctagaagtatattttgcagaatttagccaattctaaaatttatataaaaaataaaaaagtagagtatccaaaagaattttgaaaagaatcttgatacataccattaagtagctgtcactttttatttatttatttaatttaaaaaaattagattgatattttataatttttcaacttttactttaggtttgagggtacacatgaaagtttgttatataagtaaactcatgtcatgggagtttgttgtacagagtattttgtcacccaggtattaagcctagtatccaatggttattttttctgctcctgcctcctcccaacctccaccctcaagtagaccccagtgtctgttgtttccttctttgtgttcataagttctttatagtttagctcccactaataagtgagaacatgcagtatttgtttttctgttcttgtgttagtttgctaaggataacggccttcagctccatccatgttcccacaaaagacatgatcttgctatttttatggctgcatagtattccacggtgtatatgtaccacattttaaaaaatcctatttgttattggtgggcatttaggttgattccatgttttgctattgtgactagtactgcaataaatattcatgtgcatgtgtctttatggtaggatgatatatattactctgggtatatccccagtaatggggttgctgggttgaatggtagttctgcttttagctctttgaggagttgccatactgctttccccaagtggttaaactaatttaccactcccaccaacagtataagtgttcccttttcttcacaacctcaccagcatctattttttaacttttactaatagccattctaactggtgtgagatggtatctcattgtggttttgatttacatttctctaatgataatgattttgagctttttttgtatgcttgttggctgcatgcatgtcttctttcgaaaagtgtctgttcatttccttttcccaccttttaatggcgttgtttttctcttgtaaatttgtttaagtaccctgtagatgttggatattacacctttgttggatgcatagtttgtgaatattttctctcattctttaggttgtctgttcactctgttgatagtttcttttgctcttgcatttaattagatgccatttgtcaatttttgcttttgttgagattgctttttgtgtctttgtcaggaaatctttgcttattcctgtgtctagaatggtattgcctaggttgtcttccagggttcttatagttttgggttttacatttaagtctttagtctatcttgagttgatttttgtatatggtgtaaggaaggggtccagtttcaatcttctgcatatggctagccagttatcctagcaccatttgttgaataggaattcttttccccattgcttatttttgtcttagatcagatggtcataggtgtatggccttatttctgggctctctattctgttccattggtctatgtgcctgtttttgtaccagtatcatgctgttttggttactgtagccctgtagtatagtttgaagtcaggtaatgtgatgcctccttctgtgttctttttgcttaggattgacttggttattcaggttcttttttgattccatatgaattttaaaatagtttttcctagttctgtgaagaatgtcattggtagcttaatagtaatagcactgaatctataaattgctttgggaagtgtgtccattttaatgatattgattcttcctatccatgagcatgagatgttttaccatttttttggtgtcatctctgatttctttgaacagtgttttacaattctcactgtacagatctttcaactctctggttagctgtattcctagttattttattctttttgtggcaatcgtgaataggattgccttcctgatttggctcccagctcttgttggtgtataggagtgctagtgatttttgtacattgatttcgtatcctgaaactttgttgaagttatttatcagctgaaggagctcctaggccaagactatggggttttctaaatatagaatcatgttgtctgcaaacagggatagtttgacttttttacttcctttcttcctatttgtatgcccttttttctttcttttgcctgattgctctggctagaacttccaataatatgttgaataggactagtgagcaaaggcatccttgttttgtgctggctttcaaggggaatgcttttgcccatcaagtatgatgttggctgtgggtttgttgtagatggctcttattattttgaggtatgttccttcaatacctagtttattgagaatttttaacataaaggggtgttgacttttattaaagccttctcttcatctattgagataatcatgtggtttttgtctttagttctgtttatgtgatgaatcatatttattgatttgcatatgttgaaccaactttgcaccccgggaatgaagcctacctgatcatggtggattagatttttgatgtgctgctggatttggtttgcaggtagtgtgttgaggatttttgcattagtgttcatcaagaatattggcctgaaattttctttttttgttaagctgacactttttagtttgatgccaccccatttgtctggtttgcttttgttgcctgtgcttttggggtcatatccaaaaaatcatttctcagaagcttgattgtcaagaagcttttccctttgttttcttctagtagttttacagtttcaggtcttgtgtttaagtctttaatccattttgagttgattttgtatatggtttgggataaaggtctaatttaatccttttgaatatgaatatccagttctccccacaccatttgttgaagagaatgtcctttctcctttgcatattcttggcacctttattgaagatcaattgaccataaatgcatagttttatttctagcctccctgttctgttccattggttgatgtgtctgtttttatgccaccaccttgctgttatgcttactagagctttcttgacacagtatgttttgagatcaggaattatgatgcctccagtattttttttcttgaggattgctttggctatttagggtcttctgtggttctacataaattttagttttttttctatttttgtaaaaaaatgccattgggattttgataaggattgtactgaatcagaagattgcattaatactccagtccatgaacataggatatctttccatttatttttgtcttgtttaacttccttaatcaatgttttatagttttagtgtacatgtttttcacctctctggttaaatttaagcttaggtattttttttgatgctattgtaaatgagattgtttcttgatttctttttcagatagttcattgttagtgtatagaagcactattgatttttcacattgattttgtaacctgtaactttactgaatttattcattagttctagtagttcttttttggtggagtttttagggttttttaaaaatatatttatatatatatgtttttatatatatatcattttaagtgtaaacagagacaaatttccttttttatatctgatttgggtctctttcatttatttttcttgcctaattgctgtgaccaggacttccagtactatgttacatagaagtagtgagagtgagcattcttgcctttttcctcattttagtggtaaagctttcaatttttcaccattgagtatgatgtttgttgtgggcttgtcgtatatggcctttatcatattgaggtacattccttctgtagcgaatttattgagagtttttattataaaagaatgttgaattttgtcaaatgcttttttttgcgtatattgagatgatcatgtggttttagtccttcattctgttaatgtgatatgccacattaattgatttgcatatgtggaatcatccttgcatctcgcatcccagggataaatcacacttgatcatggttattatctttttatcttttttttttttttttttaacagagtctctctgtgttgcccaggctggagtgcagtggcgttatctcggctcactgcaagctccacctcccaggttcacgccattctcctgcctcagcctcttgagtagctgggactataggcgcccgccaccatgccctgctaatttttttttttttgtatttttagtagagatggggtttcaccatgatttccaggttggtctcgaactcctgacctcaggtgatccacacgccctggcctcccaaaatgctgggattacaggcatgagccactgcatctggccggttatatgactttatatgtttgtcaaaactcataaaactatgtactaaaaggctgaattttattgtatgtaaactcttccccaataaatctgacctaaaaaacaatcaaattctgttgactttaggataaagtattcagttatcaatgagtcttccctcaatggtgtatgaggcagaaatcacgttgcagagccgtggcatgatgtcccctgcacattccctttctagaacttgtcccagtttgaaattgctatacacatctccctgttaatccattgattactctcctctcctccacctggctgcactgagggccctggaaggcactgtatctctattacccagctgtgtgcttagcaataagaaacacttgtttgttgaatgaatgaataaatgaatgaatgaatgtatgattaaataggtgaattttatggatgaattctacatattgaccttgaagatatttcttaatatcacaacaaatattcaaataacaaatagttatttttaatctaagccagttattagccttattagtcagagtgccaactttgactttttacctccctaaagattcccaatatattgaaagggtggtattctgtcttctcttctagaattttctatgtattttccaacccaaattcttctttgctgccttaataatctcccaggaataccacctggagtaaatcctcactcactgcccattgactctactataggcttattttttatcttttaaattattaaaaaatatatatatacacttagagattgggatcttgctctgttgcccaagctggagtgcagtggtgacaaagctcactgcagccttaaactccttggctcaagggatcctcccacttcagccccccgaggagctgggattacaggcagaaaccattctgccaggcttattatataggttcctttagctggcagcacattcaagtgataatttatcatgaaccatatagaagatcacatctgctccagagggattcccccagcaggcataacttttcttcagagagagaaaacctccacatctgctttaggtgggaagaggtgtgtgattacggtcctgtctctttcagatcggcgcctacttcggggcctccctctgctccgtggacgtggacagcaacggcagcaccgacctggtcctcatcggggccccccattactacgagcagacccgagggggccaggtgtccgtgtgccccttgcccaggggggtgagtggcaatgggacctgggctgggtggggcccggtgtgggtggaggggtcgcctgggttggggcctgatactgtttgtgtttagcagagggctcggtggcagtgtgatgctgttctctacggggagcagggccaaccctggggccgctttggggcagccctaacagtgctgggggacgtaaatggggacaagctgacggacgtggccattggggccccaggagaggaggacaaccggggtgctgtttacctgtttcacggaacctcaggatctggcatcagcccctcccatagccaggtgagacctggtcactgtccttgtcatgacagtagcctctttgttgatctttctcctaattcagtgtgcccacagctgccagataagttctcacagtactcctttcagaaccttcaaaaataataacatgtggctgggcctggtggctgacgcctgtaatcccagcactttggaaggctgagttgggaggattgtttaagcccaggagctcaagaccagtcagggcaacatggtgagaacccatctctccaaaaaaaaaaaaaaaaaaaaaaaattagccaggtgtggtggcatacacccatggtcccagctactctggaggctgaggccggaggattacttgagcctgggaggttgaggctgcagtgagtcctggtcacaccactgtactccagcagccagagtgacagagtcagacttgcacatgcatgcgtgcacgtgcacacacacacacacattcacagaaatctcaaagactcttagttccagattgattatttctacagcaataggaggtgcatgatagcctcatcacccccactttacagatgagtagatcaaggcccagcgatggcaaatggcaagctagcagtattgggatgcaggcattcctttcttctgaatctcggtcctggtaaggtgaccaagagctctagtttgcttaactctgtcccagatttagtactgaaatcccacatcctgggaaacctatgcggttggccaccttacgggattgcacacttcacagatgtggaattgtgcagtcacacgtgcccctctctcagaatcgccctgtgcttggcttaatgctctgctattgccatcttcaattcttagtaatttttcaacaaggggtcctacgtttttttgcattgggtcttgcaaagcatggagcccatcctgatgacttgtcaccctatattctggacctgacaactgttttgctctgtaagttggctttctgtctcctgccaggtggagcccactgtctggagggacccttacagtctggttccatcttccctgttcatattctttcccaccatagccacctgagaccatctagttttctggcctctggtctctgggtttttgctagccttacatttttctttctttatgtttaaaaatttttttattgtggtaagggcacttaacatgagacctatcctcttaacagattttaaaatgtacaatgtaatactgtcatctattggtgcaatgttgtacagcagacctcttgaacttcatcttgcatattgaaaatgtatacccattgattagcaactcctcattgttctctagcctctggcagccaccattatattctttgcttcaatgagtttggctgttttatttttttttagtttttgagacaaaagtttcagtctgtcgcccaggctggagtgcagtggcacaatctcggctcactgcaaccttacctcctgggttcaagcgattctcctctctcagcctcctgagtagctgggattacaagcatgcaccaccatgcctggctaatttttgtattttttgtagagactgggttttgccatgttgtccaggctggtcttgagctcccggactcaagtgatccacctgccttggcctcccaaagtgctgggattacaggtgtgagccaccgcaccctgccagtttggctattttagataactcatataagtgaaaccacgccgtattcatcctttggtgactggcttatttcacttagaataacgtcctccaggttcatccatgttgtcacaaatgaaagaatatctttcttctttttcttctcctcctcctcctcttcctcctcctcctcctccgcctccccctcctcctcctcttcctcctcctccccctcctccccctcctcgtcgtcctcctctcctcctcctcctcctcctccttcttcttttttgacaaagtcttgttctgtcacacaggctggagtgcagtggtgcaaacacggctcctggaagcctcaacctcctgggctcaagcgaccctcccacctcagtctcctgagtagctgggactgtgggcccattccaccatgcctgtctaatttatttttattttttgtagagatggggtctccctatgttgcccaggctgatggctttcttttttaaggctgaataatatcccactgtatgtatataccacaattaaaaaaatccatcatttcctggtagagagggaaggaaaaatccctcatctgttgataggcatttaggttgttttcacatcctggctattgtgaatagtgctgcaatgaacatgggcacgttcatatctctttaagatcataatccccattcctctggttaaataaccagaagtgggattattaaatcatatggtagttctatttctaattttttgaggaacttccatacgttttccctaggagctgcaccattttgcagtctcgccaacagtgtgcaaaggttctgatttttccatgtgtttaccaacacttgtcttttgtttttttggcaatagccaggctagcaggtgtgcaagtgaaatttcactgtggctttgatttgcatttccctgatgattagtgatgttgagcatcttttcatgtatgtattgggcatttttgtgtctgaaaaaaatgtctcttcaagcccttaagcttatttttaaatcaagttattaaggccgggagcagcggctcatgcctgtaatcccagcacattgggaagccgaggcgggtgtatcacctgaggtcaggagttcaagaccagcctggccaacagggtaaaacttcatctctactaaaaatacaaaaattagccgggctgtggtggtgcatgcctgtaatcccagctattccagaggctgagatgggagaatcgcttgaacccgggaggtggaggttgcagtgagccgagattgtgccactgcactccagcctgggagacagagggagaccttgtctcaaaaaaagagaaaagttattagattttttgctattgagttgtatgagttcactatatattttggagattaaccccttatcagatacatggtttgcaaatactctctcccattccataggttatattttactctgcttattcttgcctttgctgtgtagaagtctcacttggtttgatgcagtcaggcttagttatttttgtcgtctgtacttttggtgtcatagccataaactcattgctcaaaccaccatctttccagcttctcccctgagttttattctagatgttttactttttcattgaagtctttaattcattttgaattgatttttgtgtatggtatatgagtcaagttgcattctcctgcatttgtatatccagtttcccaataccatttgtctaagagagtatcctttacccattgtgtattcttggcattatttaggagaatcagttggacccatatggatgggtttatttctgggctctgtattctgttccatttgtctatatgtctatctttatgctagtaccatactattttaagtactataactttgtcatttatatatataatcctgcattttattagagtcaaataacattaaaagaaagacacttatattcgctttagaaaacccattgatgttgatgaatttggcacatacttataaaagcaaggcttattagctcatatatttggaactaaaaagtatttgaagttgatcacagcataatgaatcctcaatttccagagtactagagatgattatatacaaaaatccagtgaaacttattttactaatttaccagttctatatcactcctaaatttccctaaaaatatggatttataaaaggtagtattctataattcacaaatatgaagagctttattataatttgagtatgaactgtgtatcacccatatcatggcttcagaaaactattgcttttcttactaacttatttaaggtttcactacatgagtcagtatgcagaactcactatgttgtaactacgatctgtaatgataaaaatatagaacctctttgactttaatctaaaaaagtcaccttatcataaaacagtgttaacataatcaaaaattaaccctgacaaaaaaaaacccacttattttggcttttaaaaatagctcatgctcatggttctttcaaagtggtgttgtagctaccgtcttttctaacagaggaatattttcatcatagcaactatttctgagccaaaaataaaccacactaaaaacagaagaaaattctcagtgtagaaaggaaaaggctcatctgttgtgcaatagcaggcatcgggctctgtgagtgcctttcagacatcctcaatcaacccaactagaggcactattgagtttatccagtaagagcactgtgcaatctagtgctgtgagggcattacttaattagccaaaggaagaacaatctttttttctttcttttcttttcttttttcttttcttttcttttttctttctttctttctttcttctttctttctttctttctttcttccttcctttctttctttctttctttctttcttttttctttccttctttctttctttcttttttttctttctctttctcttttgtttttgtttttgttttgagacggagtctcgtgctgttgcccaggatggagtgcagtggagtgagctcggctcactgcaacctccgcatcccaggttcaagctattctcttgcctcagcctgccgagtagctgagatgacaggcgcccgccactacgcctggctaatatttttctctttttaggagagacggggtttcaccatgttggccaggctggtctcgaacacctgaccttgtgattcacctgcctcagcctcccaaagtgctgggattacaggcgtgagccaccgcgcccagctttttctttctctttctttcttctttctttctctctctctctttccctccctctttctttctttctctctctctctttccctccctctttctttctttctttctttctttctttctttctttctttctttctttctttctttctttctttctttctttctttctttttctttctctctttctttctctctgtttctttctctctctttttatttttttgagacaaggtctccctctgttgcccaggctggagtgcagtgacgagatcatggctcactgcagtcttgacacccaggctcaagcaattcttccttctcagctgcccaagtagctgagactataggtgtgcacccccacgcttggctaatttttcaattttttgtagagatgaagtctcactatgttggccaggctggtcttctggcctcaagccatcctcctgccttggcctctcaaagtgttaggattatagatgtgagccactgcacccagccaaagcagtcttcaagttatgtaccagtaatttatatagcttttctaaaatttaagaaagtactgaatggactatagttattatctaaaatttaagcaagtactgagtggactatagtcattatatgattttttaaaaaatttcagtaacttttggggtacaagtgctttttggttacatgaatgaattctatagtggtgaattctgagattttagtgcacctgtcatcaaagcagcgtacactgtaccaaatatatagtcttttgtctcttacctcctcccagactccccttccccaagtcctcaaagtccgttacatcactcttgtctttgcatccttatagtttagctcccacttataaatgaaaacatatatttagttttccattcctgtgttacttcagtaatggcctccagttctatccaagttgctgcaaaatacattatttgttcctttttatggctgggtagtactctgtgtatatatacacatatacacacacacatatatataactttttaaaatccactcattggtcgacgggtaccacagtttggttccatatctttgcaattgtgaattgtgctgctataaacatgcatgttcatgtatctttttcatataatgacttcttttcctttgggtagatacccagtagtgggattactgaatcaaatggtagatctactattagttatttaaggaatctccatactgttttccatagaggttgtgctaatttacattcccaccagcagtgtaaaagtgtccccttttcatcacatccatgccagatctattgttttttgactttttagttatggccattcttgcaggagtaaggtggtattttattgtggttttaatttgcatttccttgatgattagtgatgttgagcatttttttcatatgtttatcggccatttgtatatcttcttttgagaattgtctattcatatcctttgcctactttttgatgggattatttgttttttccttgctgatttgtttgagttccttatagtttctggatagtagtcctttgtcagatgcatagttggcaaatattttcttgcattctgtgggttttctgtttgctctgatgattatttcttttgctgtgcagaagctttttagtttaattaggtcccatttattggttttgttgcatttgcttttggggtcttggtcatgaattctttgcctaggccaatgtccagaagagtttttccaatgttatcttgtagaattgttatggtttcaggtcttagatttcagtctttgatccatcttgagttgatttttgtataagttgagagaagaagatccagtttcattcttctacatgtgatttgcctgttttcccagcgccatttactgaatagggtgtccttttcccaatttatgtttttgtatgctttgtaaaagatcagttggctgtaagtatttggttttatttctgggttctttgttttgttccattggtctaagtgcctatttttataccagtaccatgctgttttggtaactatagccttgtagtataatttgaagtctggtactgtgatgcctccagatttgttctttttgcttagtattgctttggctatttgggctctttttttttgttccatatgagttttaggattgttttattctagttatgtgaaaaatgatgttggtattttgatgggaattgcattaaatctgtagattgggcagtatggtcattttcacaatattgattcttcctatccatgagcatgggatatatttccatttgtttgtgtcatctataatttatttcagcagtgttttgtagttttccttgtagggagcttcacctccttggttaactatattcctaggcattttattttatttttgtagctgttataaaaggggttgagttcttgatttgattctcagctttgtcattgttggtgtatagcagtgctactgatttgcatacattgattttgtaacctgagactactgaaattgtttatcagatctaggaatcttttggatgagcctttagcattttctaggtaaatgatcatatcattggcaaacagctctaatttgacttcctcttttccaatttggacccctttatttctttctcttgactgatttgatttggctgggactttcagtactgtgttgaatagaagtgctgaaagtgggcattcttgtcttgttccagttcttagtgagaatgctttcaacttttcccccttcaatatgaagttggctgtgcttttgtcagataatggcttttattattttgagataagtcccttctatgtctaatttattgaaagcctttttttaatcataaagggatgctggattttatcaaatgcttgttctgcatctattgagatgattatatagttttcttctttaattctgtttatgtgatgtatcacatttattgacttgcatatattaaaccattcctgcgtccttgggatgaaacagacttgatcatgatgtattatctttttgatgtactgttggatttggttagctagtattttgttaaggatttttgcttctatattcatcagggatattgttctgtagttttcttttttttgttatatccttttctggttttgatattagtgtgatactggctttatagaatgatttagggaggattccctctttctctatcttttggaatagtatcatatcattggtaccaattctttgaatgtctgttaaaattcagctgtgaaaccttctggtcctgggctctttctgatttgatctcgctgcttgttattggtctgttcttggtatctatttcttgctatagctattatatgattaatccaaggtaccgaaaagcattttgaatgatttagcaggccatcctttttccttgtgtcctaatgaggaatttttttgacgcttcataattctcttaacaaggaattttagctcctcctccatcattttgtaaaataacgatgataatttaaaacttccatcaacatattaaattttcaaaattaaacaactaaaagctacaaaaatctcaaagtttgagttttaaactgaatatttgaagctaatatagaaatttttgataagaatatcagtgcagacatataacactcaaaccttcacagctaatggcaatatctattagcaatgcaaggtactctttttttttttttttctttttgagatggagaattttgccctgttgcccacactggagtacagtggcatgatcttggcttactgcaacctctgcctcctgggcaagagattcttttgcctcagcctcctgagtagctgggattacaggagtgcgccaccatgcccagctaatttttgtatttttagtagagattgggtttcaccatgttggccagtctggtctcgaactactgaccttgtgatctgcccgtctcagcatcccaaagtgctgggattacaggcatgagccaccatgtctggccgcaaagtactcttaatgacttttaaatcatgtttaacagagagtttacacaagttagtccaatgtagttagtattagtgtccaataatatatgaacacccttcaagacaattgctgctacattttcaatataattattaattgttgtctgaaaaacacacataaacgcaagtgagactaaaagttgtgtcacaaaagaaaaaaagaaaagaccagtaccatgctgttttggttactgtagcctggtagtatggtttgaagtcaggtagcgtgatgcctctagctttgttcttttggcttaggattgacttggcaatgcgggctcttttttggttccatatgaactttaaagtagttttttccaattctgtgaagaaagtcattggtagcttgatggggatggcattgaatctataaattaccttgggcagtatggccattttcacaatattgattcttcctacccacgagcatggaatgttcttccatttgtttgtatcctcttttatttcattgagcagtggtttgtagttctccttcaagaggtccttcacatcccttgtaagttggattcctatatattttgttctctttgaagcaattgtgaatggaagtgcactcatgatttggctctctgtttgtctgttactggtgtgtaagaatgcttgtgatttttgcacattgattttgtatcctgagactttgctgaagttgcttatcagcttaaggagattttgggctgagacgatggggttttctagatatacagtcatgtcatctgcaaacagggacaatttgacttcctcttttcctaatcgaatgccctttattcccttctgctgcctgattgccctggccagaacttccaacactatgttgaataggagtggtgagagagggcatccctgtcttgtgccagttttcaaagggaatgcttccagtttttgtccattcagtatgatattggctgtgggtttgtcatagatagctcttattattttgagatatgtcctatcagtacctaatttatggagagtttttagcatgaagggttgttgaattttgtcaaaggccttttctgcatctattgagataatcatgcggttttcgtctttggttctgtttatatgctggattacgtttattgattttcgtatgttgaaccagccttgcatcccagggatgaagcccacttgatcatggtggataagctttttgatgtgttgctggattcggtttgccagtattttattgaggatttttgcataaatgttcatcaaggatattggtctaaaattctctttttttgttgtgtgtctgccaggctttggtctcaggatgatgctggccttataaaatgagttagggaggattccctctttttctattgattggaagagtttcagaaggaatggtaccatctcctccttgtacctctggtagaattcggctgtgaatccatctggtcctggacttttttttggttggtaagctattagttattgcctcaatttcagagtctgttattggtctattcagagattcagcttcttcctggtttagtcttgggagagtgtatgtgtcgaggaatttatccatttcttctagattttctagtttatttgcgtagaggtgtttgtagtatcctctgatggtagtttgtatttctgtgagataggtggtgatatcccctttgtcatttttgtattgcatctatttgattcttctctcttttcttctttattagtcttgctagggctctatcaattttgctgatcttttcaaaaaaaccagctcctggattcactaattttttgaagggttttttgtgtctctatttccttcagttctgctctaatcttagttatttcttgccttctgctagcttttgaatgtgtttgctcttgcttctctagttcttttaattgcgatgttagggtgtcaattttagatctttcctgctttctcttatgggcatttagtgctataaatttccctctacacactactttgaatgtgtcccagagattttggtatgttgtgtctttgttctcattggtttcaaagaacatctttatttctgccttcattttgttatgtacccagtagtccttcaggagcaggttgttcagtttccatgtagttgagcggttttgagtgagtttcttcaccctgagttctagtttgattgcactgtggtccgagagacagtttgttataatttctgttcttttacatttgctgaggagtgctttacttccaactatgtggtcagttttggaataggtgtggtgtggtgttgaaaagaatgtatattctgttgatttggggtggagagttttgtagatgtctattaggtccgcttggtgcagagctgagttcaattcctggatatccttgttaactttctgtctcgttgatctgtctaatgttgacagtggggtgttaaagtctcccattattattgtgtgggagtctaagtctctttgtaggtcactaaggacttgctttatgaatctgggtgctcctgtattgggtgcatatatatttaggatagttagttcttcttgttgaattgatccctttaccattatgtaatggccttctttgtctcttttgatctttgttggtttaaagactgttttacccgagactaggattgcaacccctgcctttttttgttttccatttgcttggtagatcttcctccatccctttattttgagcctatgtgtgtctctgcacttgagatgggtttcctgaatacagcacactgatgggtcttgactctttatccaatttgccagtctgtgccttttaattggaacattaagcccatttacatttaaggttagtatttttatgtgtgaattagatcctgtcattatgatgttagctggttattttgctcgttagttgatgcagtttcttcttagccttgatggtctttacagtttggcatgtttttgcagtggctggtaccggctgttcctttccatgtttagtgcttccttcaggagctcttttagggcaggcctggtggtgacaaaatctctcagcatttgtttgtctgtaaagtattttatttcttcttcacttatgaagcttagtttggctggatatgaaattctgggttgaaaattctttcctttaagaatgttgaatattggcccccactctcttctggcttgtagagtttctgctgagagagaaagttcgggttacccacaaagggaagcccatcagactagatcagctgccagtctgatgggcttccctttgtgggtaacccaacctttctctctggctgcccttaacattttttccttcatttcaactttggtgaatctgacaattatgtgttttggagttgctcttctcgaggagtatctttgtggcgttctctgtatttcctgaatttgaatgttggcctgccttgctagattggggaagttctcctggataatatcctgcagagtgttttccaacttgattccattctccccgtcactttcaggtacaccaatgagatgtagatttggtcttttcacatagtcccatatttcttggaggctttgttcatttctttttattcttttttctctaaacttctcttcacgcttcatttcattcatttcgtcttccatcgctgataccctttcttccagttgatcgcgtcagttactgaggcttgtgcattcgtcacgtagttctcgtgccgtggttttcagctccatcaggtcctttaaggacttctccgcattgattattctagttatccattcgtctaattttttttcaaagtttttaacttctttgccattggtttgaacttcctcctttagctcagagtagtttgatcttctgaagccttcctctctcaactcgtcaaagtgattctccgtccagctttgttccgttgctggtgaggagctgcgttcctttgtaggaggagaggcgctctgatttttagagtttccggtttttctgctctgttttttccccatctttgtggttttatctacctttggtctttgatgatggtgacgtacagatgggtttttggtgtggatgtcctttctgttgttagttttccttctaacagtcaggaccttcagctgctggagatatagaccaatggaacagaactgagcactcagaaatagtgccgcatatctacaactatctgatctttgacaaacctgacaaaaagaagaaatggggaaaggattccctatttaataaatggtgctgggaaaactggctggccatatgtagaaagctgaaactggatcccttccttacaccgtatacaaaaattaattcaagatggattaaagacttacatgttagtcctaaaaccataaaaaccctagaagaaaacctaggcaataccattgaggacataggcatgggcaaggacttcatgtctaaaacatcgaaagcaatggcaacaaaagccaaaattgacaaatgggatctaattaaactaaagagctgctgcacagcaaaagaaactaccatcagagtgaacaggcaacctactgaatgggagaaaatttttgcaacctactcatctgacaaaggggtaatatccagaatctacaatgaactcaaacaaatttacaagaaaaaaacaaacaaccccatcaaaaagtgggtgaaggatatgaacagacacttctcaaaagaagacatttatgcagccaaaagacacatgaaaaaatgctcatcattactggccatcagagaaatgcaaatcaaaaccacaatgagataccatctcacaccagttagaatggcaatcattaaaaagtcaggaaacagcaggtgttggagaggatgtggagaaataggaacacttttacactgttggtgggactgtaaactagttcaaccattgtggaagtcagtgtggtgattcctcagggatctagaactggaaataccatctgacccagccatcccattactgggtatatacccaaaggattatacatcatgctgctataaaggcacatgcatacaagtgtttattgcggcactattcacaatagcaaagacttggaaccaacccaaatgttcaacaatgatagactggattaagaaagtgtggcacatatacaccatggaacactacgcagccataaaaaaggatgagttcatgtcctttgtagggacatggatgaagctggaaaccatcattctcagcaaactatcgcaaggacaaaaaaccaaacactgcatgttctcactcataggtgggaattgaacaatgagaacacatggacacaggaaggggaacatcacacaccagggactgttgtggggtggggggaggggggagggatagcattaggagatatacctaatgctaaatgacgagttaatgggtgcagcacaccaacatggcacatgtatacatatgtaacaaacctgcacgttgtgcatgtgtaccctaaaacttaaagtattataataataaaaaagaaaaagaaaagaaatccaatgaatcaattaatgctatcaacaaagaacatgcaagaatgtaacattacatgtaatttttgttttcaaaaaagacactaaaatgccactgcattaaaatgtatttattatttattattattatttttgagacagggtcttggtctgtcatgcaggctggagtgaagtggtgcaatcatggctcactgcagccttgacctcccaggctcatgtgatccgcctgcctcagcctcctaagtgtctttgactgcaggtgtatgccaccatacctggctaatatttaaatttcttttgcagtgacagggtctgtctatgtttcccaggctggtctccaactcctgggctcaagtgatcttcccaccttggcctcccaaagtgctgggactactggtgtgagccactgcactcagccggactataatttattcagaacatctttagtgttcattcccagagatcttgatctgctcagtaatgctttcacaagatcgattatagccatcttttgcagtgaatgcttaggctggtccgtcctcctgtggtagtagggagcagtctttttttttttttttttaaatcttcatgtttttatttattttttcttttttaaattacacattgggccaggcacagtggctcatgcctgtaatcccagcactttgggaggccgaggcgggcggatcacgaggtcaggagttcaagaccagccttgccaacatggtgaaaccccatctctactaaaaatacaaaaattagctgggcttggtggcgtgtgcctgtaatcccagctacttgggaggctgaggcaggagaattgcttgaacccaggaggcggaggttgcagtgagccaagactgcaccactgcacgccagcctggcaacagagcgagactccgtctcaaaaaaaaaaattatacgttaagttctgtgatacatgtgcagaacatgtaggtttgttacctaggtatacaagtgccatggtggtttgctgcacccatcaacccgttgtctaggttttaagcctcacatgcattaggtatttgtcctaatgctctccctcccccttgatccccacccctcaacaggctccagtgatgttcccctccctgtgtccatgtattctcattgttcaactcccacttatgagtgagagtatgtggtgtttgctttcctgttcctgtgttagtttgctgagaatgatggtttccagtttcatctatgtccctgcaaaggacatgaactcattctcttttatggctgcatagtattccatggtgtatatgtaccacattttctttatacagtttatcattgatgggcatttaggttggttccaagtctttgctattgtaaatagtgcttcagtaaaaatacatgtgcatgtgtctttatagtagaatgatttataatcctttgggtatatacccagtaatgggattgctgggtcaaatggtatttctggttttagatccttgaggaatcgccacactgtcttctacaatggttgaactgatttacactcccactaacagtgtaaaagcattcttatttctccacatcctctccagcatctgttgtttcctgactttttaatgatcatcattttaactggcatgagatggtatctcattgtggttttgatttgcatttctctaatgaccagtgatgagcttttttttttcatatgtttgttggccacataaatgtcttcttttgagaagtatctgttcatatcctttgcccattttttgatggggttgtttgtttttttcttgtaaatttgtttatgttccttgtagattctggatattagacctttgtcagatggatagattgcaaaaatattctctcattctgtaggctgcctgttcactctgatgatagtttcttttgctgtgcagaagctctttagtttaattagatctcatttgtcaattttggcttttgttgcaattgcttttggtgttttagtaaggaagattttgcccatgcctatgccctgaatggtactgcctaggttttattctagggtttttatggttgtaaattttacatttaagtctttaatccatcttaagttaatttttatataaggtgtaaggaagggatctagtttcagttttttgcatatggctagccagttttcccagaagcatttattaaatagggaatcctttccccatttcctgcttttgtcaggtttgttgaagatcagatggttgtagatgtgtggtgatatttctgaggcctctgttctgtttcatttgtctatatatctgttttggtatcagtaccatgctgttttggttactgtagccttgtagtatagtttgaagtcaggtagtgtgatgcttccagctttgttgttttgcttaggattgtcttggctatatgggctcttttttggctgcatatgaaatttaaagtagttttcacaagatcagctacagccaacttttacagcaaacggttaggctgttcctcctgtggtagtaggaggcagggtttttttttttttttttttgagatggagtctcagtctgtcacccaggctggagtacagtagcgtgaactgcaacctctgcctccaggttcaggtgattctcctgcctcagcctcctgagtagctgggattacaggtgcccaccaccacacccagctaatttttgtatttttagtagagatggcatttcaccatgttggccaggctggtctcaaactcctgatctcaagtgattcacctgcctcagcctcccaaagtgctgggattacaggtgtgagtcaccgaacccggccctctttgcccatttttaaattgggttatttattttcttactattgagttctttatgtgttatggatattaaccatttatcagttgtgtggtttgcaaatattttcccccagtctgtaggttgtctcttcactctgttaattattcctttattgtgcagaagctttttagtttgatgcaattccatttgtctgtttttgtttttgttgcttgtgctttcaggatcatataaaaaaatcattgcccagaccaatgtcatgaagctttccctctacgtttccttctaatagtttatagtgttagatcttacatttaagcctttaactcactttttaatttttttattttttaatttaattttattttagatggagtctctctctattgcccaggctggagtgcagtggcacgatctcagctcactgcaacctccacctcccgggtcccagcgattctcctgcctcagcctcccaagtagctgggattacaggcctccgccaccatgcctggctacttttttgtatatttaatagagacggggtttcaccatgttggccaggctggtcttgaactcctgatctaaggtaatccacccgcctcagtctcctaaagtgctgggattacaggcgtgagccactgcacccggcccagcacttttgatttttgtatttggtttgagataaaggctcagtttcattcttttgcctgtggatatccagtgttcttaacaccatttgttaaaaagactgtcctttccccattgtatgcccttggcacctttgttgaaaattagttgattgttggccgggcgcggtggctcatgcctgtaatctcagcactttggaaggctgaggcgggtggatcatgaggtcaggaaatcgagaccgtcatggctaacaaggtgaaaccccgtctctactaaaaatacaaaaaattagccgggcgcggtggcgggcgcctgtagtcccagctactcgggaggctgaggcaggagaatggcgtgaacccgggaagcagagcttgcagtgagtcgagattgcgccactgcagtccgcagtccggcctgggcgacagagcgagactccgtctcaaaaaaaaaaaaaaaaaaaaaaaaaaaaaaaaaaaaaattagccaggcatggtggtgggcacctgtagttccagctactcgggaggctgaggcaggagaatgggggaacctgggaggaagaggttgcagtgagcctacatcatgccactgcactccagcctgggtaacagagcaagactccgtctggaaaaaaaaaaaaaagaaaagaaaattagttgattgtaaatgcatgggttcatttctgagctctgtattctgttccattggtcaatgtctctgtttttatgtcagtgtcatgctgttttgctgagtatacctttgtggtgtattttgatgtcaggtagtgtgatacctctacctttgttgtttatgctcaagattgtcttggatatttgaggtcttttgtgacttcatattaattttagtattgttttttctatttctgtaagaaatgccattgggattttggtaggaattacattgactctatcgatcactttgaatagtatggacctttaaaaatattctttcaatccataatatgggatatctttccattgatttttgtcttaactttctttcgtcaatgttttatagttttagtgtgcatatttttcaccttcttggttaaattaacttgtaagcattttattttttgatgccattgtaaataggattaatttctttttcagatagtttgttgttagtgtatagaaacaaataatttttgtatgttcattttgtattccatgactttactaaatttgtttattaaatttgataactttttcgtagagtatttataacaagtttcttatatataagatcatgtcaattgcaaacagggacaatttttttttctttatttctaacttgaatgcatttcttatctttttcttgcccaattgctctggctaggactttcagtactgtgttgaaatagaagtggtgagtgtgggcatccttgccttgttcctaattttagtggtaaaatcaaattttcaccactgggtatgatgttaactagacactttttttaatgttctttatcatgttgatgtaatttccctgtatttctagtttgttgagggtttttaatcatgagtggctattcctgtggcctgaatgtttgtgtcctccccagattcatatgttgaagcctaattccttgtgtgatggtatttgtagatgggacctttggaaggtgtttaggtcatgagagtgtggccatcattaataggattagtgcccttagacaaaagcaaaatgatggttgcctatgaaccagaaaataggctctcaccagatattgaatctgcttgcaccttgattttggatgtcacaagtcttcagaactatgagaaataaatttctattgcttataacccatccagtctatgttatttgttataccaaataagctaagacagatgtttagttttattaaatgctttcttttcttattgataagatcatgttatttttattccttattctgttaatgtggtgcatcacatttattgatttgcatatgttgagccatccttgcatgccaggaataaagcccacatggtcatggcgtatgacccttttgtgctattgaattcagtttgctagtattttatttaggattttggatctatgttcaatagggaaattggcatgtagtgatcttttctcatggtgtgtttgttgggatttagtgtcaggatagtgcttgcctcatacaataagtttggaagtattccctcctcttcagttttttggatgagtttgagaagaattcatattaattcttatttaaatgtttggttggtagaatttgcctgagaagccaccaggtcctgggcttttctttgttaggaggtctttgattactgattcaatttccttactcattatagatctgtttaaactttctattgccttatgattcaggcttggtaggttgtatatttctaggaatttatccattccttcaaggttatcaagtttgttaacatataattgttcatagtagtctcttaatgatcctttttattgctatggcatcagttgtatgttctttcatttataattttacttatctgttgtttctgttttttctccctttttccttggtctacctaaaagcttgtcagttctttttttttttttttttgagatggagtctcactctgttgcccaggctggagtgcagtggcatgatcacagctcactgcattctccacctcccaggttcaagtgattctcctgcctcaggctcctgagtagctggcattacaagcacgtgccaccacacctggctgattttcgtatttttagtagagacagggtttcaccatgatggccaggctggttttgaactcctcatctcaggtgatccacttgcctcgacatcccaaagtgctgggattgcaggcgtgagccactgcacctggccaaagcttgtcaattctatctttttgaaaaatcaacttaatttcattgatttttttctattctctatttgatttatttttctgtaatctttattattttcttccttctactaactttaggtttagtttgttcttttatttctcatttcttgaggtgtaaagttaggttttgtaattgaaatttgtctttttgttttaaaattaggtgtttatcccgaactttcctttagtactgcttttgctgcctcccattaagtttggtatattgtgtttttgttttcatttatctcatgttattttctaatttatttttttatccattagttgttcaatggtgtattgtttaatttttacatatgtatgtttttttccagtttttcttctggtattgtttttagtttcattccattgtggttggaaaagattcttgatataatttaaatcatttcaaatttgttaagacttgttttgtgacctaacatgtggtctgtcctggggaatggtccatgtgcacttgagaagaatgtatattctgcagtagttggcttgtgtattttgtatatgtctgttaagtccatttggtccattctcccttgggttttttttttgtctagttgttctatttgctattgaaagtaggattttgaagtttcttactattgaattgctgtctatttctcccttcagttctgtcattattagctttatatattcagatgtctgatgggtgtgtatataattaattgttgtaactcctggtgaaatggccatttcatcattatataatatcattatttgttttttgacttaaagtctattttgtctgatattagcatgtcatcctgctctcttttggttaccattttaatggaatagcattttctactcctttacttttagcctatgtgtcagtaaatacaaagtgggtatcttgtagatagcatataattggattttgtatttttattaattctgccactctgttttgagagtttgcttctgtttacatttaaagtaattattgatagagaaggatttactactgccattttgttaattgttttctgttagtcatgtaggtcttttgtccctcttttcttctcttgctgtcttcctttgtgttttattgttgttaatttttgtattaatatgctttcattttgttctctttttgtacttttttttttttgagacggaatctcattctgtcacccaggctggagtgcagtggtgcgatctcggctcactgcaagctccgcctcccgggttcaggccattcttctgcctcagcctcccgagtagctgggactacaggtgcccaccacctctcctggctaattttttgtatttttaatagagatggggtttcaccacgttagccaggatggtcttgatctcctgacctcgtgatccgcccacctcagcctcccaaagtgctgggattacaggtgtaagccacgtgagccaccgcgtctgaccctttttttgtgtatataacttctaaaggtattttctttgtggtttccacaaaacatctcataattatcatggtctattttaagctgataacaactgaacttaaatcacatgcactctatacttttattccccactacacgttttacgttattgattcacaatttacagttatttatattgtgtatccagtaacataattttagctatagttatttttaatatctttgtcttataacttttataccataattaaaagtgtccaattcacttgcattaaggacatgacaaaatcacttttaaaatttctttaaaatttattatttggctgtcatttttttcaatattactcttgcacatactttaaagagtcaaaatagttccaaaaagctcactattaaaaaacaacaatttccacatacacgatggttttggcttcatttcccttgctcttgagggaaccactttcagctctttcaattctctatttgttccaattacataataataattttgctactttttgatttttgttttaccactgacttcccaccatggaaggtggagattgatctctttttcagttttccttttgccacatagtagcactcttttaccccccattcacgcctcatgtttatgtgatcattttgtttagatcaacattcagtgtttgcattattctgactacgtaaatgaaattcagctgagccaaataatatacttttacttttccctgtatgcagggaaatgcaggtaattaatagaaattggggttgggcgtggcggctcacacctataatcctagcacttgagaggctgacagggcagaatcgcttgagcccaggagttcaagaccagcctgggccacaaagtgagacccccgtttttattttaaaagtttttttaaaaaagaaattgtaggtatcctcttgaggttgtggtctaaaggtgaataattccttgataagttctaagctgtcctagttccttggttagttgcaagagatgagacttgagtagagcttagagaacctctgtctgggccatgctggatgactgagttatacatctcctgtctttcctacccctttctctctccacacctcttttttaccctcagcggatagcaggctccaagctctctcccaggctccagtattttggtcagtcactgagtgggggccaggacctcacaatggatggactggtagacctgactgtaggagcccaggggcacgtgctgctgctcaggtgagaatgccttttggagtcaaccggacattctcccttgaaggaatgtttcctgtttgaaggtccctgatggttttctggtgtccctttaggtcccagccagtactgagagtcaaggcaatcatggagttcaatcccagggaagtggcaaggaatgtatttgagtgtaatgatcaggtggtgaaaggcaaggaagccggagaggtcagagtctgcctccatgtccagaagagcacacgggatcggctaagagaaggtgaggcttggtggatgagtctcaagaggttaaacgaccgaggacatgaatgggtgctgcaatccactctgcccagccttctggctgtcctgaactgagttctcacaggctctgacaaccttctccaagccttacctgagtgagcaggctattgtcctgctgggtagggaagtccagtggacctccctaaagaggtgagcatgtggcacttccttactcactcagttctccagagaactgaaggccccatgcctgtgaacaaactatgtttttgttttttaataaacggagagaaaacctatttggggagattgaattgatgaagctaaacagagatttacaaagcactcacatacgcattttatcaccagtgacttcttcccttgttcctattctcaaagagtagaactgtgtttggggtgggagaatagtaatgacaatactaagaataactgtctctagtagtgacagcactaggaataactgtctctagtaatgacagtactagaaagaattgtaccctctttaaaagtaaaattattagctaggcatgatggcatgttcttgtagtctcagctacttgagaggctgaggtgggaggggaggatcacttgagcccaggaggttgaggccagcctgggcaacatagcaagacccatccctaaaaaatgattacctttctaggaacagttttcctgtgctgaggagatagcattccagatatgagagcagccagcatggctagaaattaagagcaaaatgttagagagtagggaattgaagaagaggtacccttaaacctacatagaagtccccctctactctttggctgactcttaagacacgaatgcctaggtcagtactccaagacacccagtagaaaacagcaactgaaaagccaaagagctgatcagagaattcagcagctcctcagtgctggggagacagagatttgagaggccttggtaaataccttggtctttccattgagacaactgactagcaaccaagagaaacaatatacaatagaaatagacccacaggtgattcagaaattagagtgattggataggaatttttaaaaggtaactataattaatatcttcaagaaaaaagggaaaggatgagaacttcagcaaaaacctggaattcataaaatagagtcaaatggaaactctagaaccaaaaatcgcactgactgaaatgaagaattcagtaaatagatttatagcagattagaagcagaacagagaattagtgaacaagaagacagtcatttgaaagtatctggataaatatgcgataaaaagaaagaaaaatacagaaaaacaccataagagatgtgtgggatatggtgaaagatctaacaaacatgtaattggaattacagaaagtggtggtgggggaggagagagagagagagagaaagaaaataggaaagatggaataggaaagacagaataggaaagatggaataggatggaataggaaagatgcagtagttaaagaatttccccaaactggccagtcacggtggctcacgcctgtaatcccagcactttgggaggccgaggcaggtggatcacctgaggtcaggagtttgagaccagcctggccaacatggtgaaaccccatctctactaaaaatacaaaattagcaggtgtggtggtatgcgtctgtaatcccagctactcaggaggctgaagcaggagaattgaacctgggaggcggatgttgcagtgagctgagatcgccccattgcactccagtctgggtgacaagagcgaaactccatttcaaaaaaaaaaaaaaaaattccccaaactgatgaaagacatcaagattctttacaaaatcaaagcaggataaatatgaaggacattatatcattgtacgttataatcaaactgctgaagaccaaagacaaagagaaaaaaatttaaagtagtcagaaaaatacaataaattttttagtgagtgacagaatagctaccatttattgagcacttattgtataaaagacactgtgctaaatacttgataagcactatttcatttcctttttaccattgggagggtatcattattatcctcactttaaaaataaagaatggaggccaggcgcagtggctcatgcctttaatcctagcgctttgggaggctgaggcaggtggattactttgagaccagcctggctaacatggtgaaaccccatctctactaaaaatacaaaaattagcacggcgtggtggcatgtgcctataatcccagctacttgggaggctgaggcaggagaaacgcttgaacctgggaggcagaggttgcagtgagctgagatggcaccactgcactccagcctgggcaagagagtgagattctgtctcaaaaaagaaaataaaaaataaaaagaaaggaaggaaggaagaagggaaggaaggaaaggaaggaaagtaggaaaggaaggaaaggaagaaaaggaaggaaggaagaagggaaggaaggaaaggaaggaaagtaggaaaggaaggaaaggaagaaaaggaaggaaggaaaggaaaggaaaaaaggaaggaaggaaggaaagggaggaagagagcgaggaaagaaagaaagaaagaaaaaggaaggaaggaaggaaagaagactcagagaagtcagataacataccccaagtcacacagctgagaagcagaggagctgggccttgaactcccatctgccgggttccgaggctcaggcccctcactgctgtgccaccctgtcccttcaggacagatccagagtgttgtgacttatgacctggctctggactccggccgcccacattcccgcgccgtcttcaatgagacaaagaacagcacacgcagacagacacaggtcttggggctgacccagacttgtgagaccctgaaactacagttgccggtgagcaggctagtggccagacccctgggtcttccaagcatggagtgggcttggggagctgaggagggcagatccccaaatcccggctatctcttagaattgcatcgaggacccagtgagccccattgtgctgcgcctgaacttctctctggtgggaacgccattgtctgctttcgggaacctccggccagtgctggcggaggatgctcagagactcttcacagccttggtgagtccagagttggggtcctgcaggggtgtggaagagaccagagaccaaggtggttgaaactcattttatttgattgcatctaattttacttcaacatttgattttattgtttaatttcacaatacttggttattttctttcctttcatttgatcatatttattttttaaaagtttccctttgagaagaattgtggcaatgacaacatctgccaggatgacctcagcatcaccttcagtttcatgaggtgagtttcctttcctcctcacctcctccagagaaggacccgtaccatgacccgctcttttctcctcctggcccccaagggagccgggtgttcctgggctataaggtccggtgtggctgcccctccactgttgtctcttcatcaagtgtctgcgtctctgttctgctggagcaggcttgccacagggaagcccagcgccccatcccccggcctgtcttcttcttcccacagcctggactgcctcgtggtgggtgggccccgggagttcaacgtgacagtgactgtgagaaatgatggtgaggactcctacaggacacaggtcaccttcttcttcccgcttgacctgtcctaccggaaggtgtccacgctccaggtagccacatccttctcaggctctatctgacctttgcttccccatcctcacggccggaggtggatatcaccgcctttgcctcccctgccttccagaaccagcgctcacagcgatcctggcgcctggcctgtgagtctgcctcctccaccgaagtgtctggggccttgaagagcaccagctgcagcataaaccaccccatcttcccggaaaactcagaggtcagaactcctggctcctcccctccttttctctttgatttctttggggattcttttcttcttcttctcttctttagtagtggttcctttttgtacaaaacagctttattgagatataattcatataccatccaattcacctatttaaagcatacatttcaagcccggcacagtggctcatgcttgtaatcatagcactttaggaggtcgaggcaggaggatcgcttgagcccgagagtttgaaaccagcctgggtgacacggcgagaccctgtctctacaaaaaatgtaaaaattagctgggcgtggtggtgcacacctgtagtcccagctactcgggaggctagggtgggaggatcgtctgggcctgggaggttgaggctgcagtgagctatgatcacaccactgcactctagcctaggcgacagagtgagaccctgtcttgaaaataaataaaatgaaataaaataaaataaagtatacagttcagtggctttgagtgaattcatagggtcttgcatccgtcatcatgatccattttggaacatcttcattacctcacaaagagcttctgttcccgttggccctcagccccagtcctcccatatcccccagccctatgcaaccactaatctactttgtctatagatttgcctattctggacatttcatataaatgaaataatcccgtatgtgatcctttccctagcataatattaagcaaggacttagcaaggatcattcatgtcgtagtatatgtcagtacctcattgctttaaaaaaattgtttttaaattttttatatatatttttgagatggagtttcacttcgttgcccaggctggagtgcagtggtgcaatcttggctcactgcaacctctgcctcccaggtttaagcaattcttgtgcctcactctcccaagtagctggggttacatgcgcccgccaccacacccagctaatttttgtatttttagtagatacagggttttgccatgttggccaggctggtctcgaactcctgacctcaggtgatccacctgcctcagcctcccaaagtgctgggattacaggtgtgagccaccgcacctggccttcattgctttttatttggtgaacaatatcctgttgcatggatgggccatatttcatgtctccattaatcagatgacgggcatttgggttattttttctctcatatttctgtcattgtctctcctttctctcactccaggtcacctttaatatcacgtttgatgtagactctaaggcttcccttggaaacaaactgctcctcaaggccaatgtgaccaggtgctctctgctaccaggcttctgcaggcagttgcccgtctgacgccccagcccctggcccatggtgggcctttgccctttgcccactggttctcccttcaactcatttgttcactcagcaaacactcactgaccacccaccacgtgctgggccttgtgctgagtgctggtgggatggtggtggatcagacgatagtggttcctgccctctcggagatgataatttagtggcaaagacagacaagaaatctagccattaatcttgcatccatctcaaatccagtatgagatgcaagattagatgggggacggccagtgttcttgggagtttggtgttcagagaagattcctaaagaaaatatatttaggagctgggcgtgctggctcaagcctgtaatcccagcactttgggaggctgaggcaaaacaattgctcgaacccaggagttcaaaatcagcctggacaacatatcaataccctgtttctacaaaaaaaaaaaaatacaaaaattagccaggcatggtggtgcatgcctgtaatcccagctactcaggaggctgaggcacaagaattgcttgagcctggaagattgaggctgcagtgagctgagatggtgccactgcactccagcctgggcaatagagtgagacccagtgtcaaaataataataataataataataataaaaaataaaagggaaaaaaagaaaatatatttagacaaagcaaaggcatgaactgagggcgggcatgaagacagaaggcaggaagcagataccagggacgggaagatcagggtgtgtttaagagtggcctcagcatgaaatgcagggctgaaggagttggtggtggttagatacaggccatgtcccaaaatgactgacgggtgttgtttgggatttgcagtttcgcctctgggagtgacataatcatatttgcatgttagaacgatcactcttcaggagggctggcgattggggtgggagcaggtgtgaattcaggggaccagttagaagaaggtggttgcagacatccagctggagagggatgggcctgggctaggcgggggcaggggttggagaacagtggggtttcagatgcagagataacagaacttggtggctgattggaggcagggagtgagggagagggaggagcaaagactaactgtcagttctcaagagccggctggagctctttctttccctccagtgagaacaacatgcccagaaccaacaaaaccgaattccaactggagctgccggtgaaatatgctgtctacatggtggtcaccaggtgctggcttccaggactttagctgagcctccacttctgggctggacatggctgattgtgcatctgtgtgcatgagtctgtgcatgtgtgtgtgtgtgagagtctgaggatctctgtgcatgtatgtgtgcatgggtgtgtatttgggcatgggtgtgtgagtgtgatgatctatgtgcatgtttgtgtgcatggacgtgtatttgtgcatgtgtgtgtctgaggatgtatctgcatgtgtgtatgtgtgcatgggcgtgtatttgtggatgtgagtgtgatctatgtgtgtgtgcgtgcatgggtgtgtatttgtgcgtgtgtgtgaggatccttgtgcatgggtgtgtatttgtgcatgtgtgtgtgaggatctatgtgcatgtgtgtctgggcatgggtgtgtgtgcatatgtgtgtgtctgaggatatatgtgcattgtgtgcatgggtgtgtatttgtgcatgtgtgtgtatgaggatctgtgtgcctgggtgtgtatttgtgcgtatgtctgaaggtctatgtgcatgcgtgtgcgcatgggtgtgtatttgtgcatgtgtgtgtgtgaaggtctatgtgcatgtgtgtgcgcatgggtgtgtatttgtgcatgtgtgtgagggtctatgtgcatgtatgtgtgcatgagtgtgtattcgtgcatgtgtgtgtgtctgaggatctatgtgcatgtatgtgtgcatgggtgtgtatttgtgcgtgtgtgtgtctgagggtctgtgtgcatgtgtgtatgtgctcatgggtgtgcatttgtgcacgtgtgtgtgagtggcccaaatgggcacgcactgtgtgtccagcacacattggttcccccatccccctgcaccccaccccatctccaccccccaggacttcatacccattacccatgtgcctgttcgctccttacacacttagcctgagacaccctcccagggcacccctcatgttttgtcacctcctgtcccttttttctcccttcagccatggggtctccactaaatatctcaacttcacggcctcagagaataccagtcgggtcatgcagcatcaatatcaggtgggcagctgggacgtctgggtcctgagaaggaggctggggaggaaaatcgatggtagaaaatgcagaaacagggatgggaaatgtgcgcaaggcacctgtggtgtgccaggcttggttccacgctgctatcactcagtatgcacacatacacgcacgtatgtatgtgacatgcacgcacgtagttatcttgtattaccttcgtagcgactctgtggggcactgtcatgatccccagtttacagatgaagaaactgaggctcagagaggtttacagaacaagctcgaggtctcccaccgagtaagtgggagagctaggactggagaccaggccgtgtggcactggaatgcgtattacatgtacactctactctctcaaacaggaaggggcaggacgcccgggcctatggcctgccccgtggggaggggaggctgattctccaggctggtgggggaggaaggccagagccctgaccccgccctccccggtgcaggtcagcaacctggggcagaggagcctccccatcagcctggtgttcttggtgcccgtccggctgaaccagactgtcatatgggaccgcccccaggtcaccttctccgaggtgagcggagctcggcctgactcctgcacggccctgcgcgttcctctcacctctgttaatgctattgggttttagagccgctccgcccctctcctggacccaggccatctcacctcccgagatgaggccctggcgccttcatctctgccccttctcagtgcgtctctttcctcagaacctctcgagtacgtgccacaccaaggagcgcttgccctctcactccgactttctggctgagcttcggaaggcccccgtggtggtgagaagctaagtcagccccagggccacacagagacccagagcgcttccctgctggaacctgtatggtctctgagcaaacggggaggggtgttctctgccttcggcttccttacccgtcccctcccctcctgcgttccccagaactgctccatcgctgtctgccagagaatccagtgtgacatcccgttctttggcatccaggaagaattcaatgctaccctcaaaggcaacctctcgtttgactggtacatcaaggtgtgtggggtcctgaggcttcgccgggcacaggcgtggtgctcagggcccaggtgcagtgcccacccgctctcttccacagacctcgcataaccacctcctgatcgtgagcacagctgagatcttgtttaacgattccgtgttcaccctgctgccgggacagggggcgtttgtgaggtcccaggtacctgtcttgggcgctgaggaactattggagggagaggggctgcgcttgtggagatttctgggggaggagagagagacacaaagagagagggagagagagagacagagcgacagagagacagagagatacagagacgtaaggagagagacagacagagacagagagatagaggcagagggagaaacagacacagagacagacaaaggagagagagatagagagtcagagagatagagatagagacagagacagtgagagatggagatagacagagagatagagataaagagagagatacagagcgcgacagagacagagacagtgagccatggagatagagagacagagagaggcagaaagcgatagagagagatagaggacagagaaacggaggagggagaggagggagaagaggtgggggaggaggactgagggctggggttctgggggacatgaggaggggttccccacttgattcaggggtgcacacggtgtgaatggggaacccccagaaatccagagtcgtctcccctgacgcccctccttcctcccccagacggagaccaaagtggagccgttcgaggtccccaaccccctgccgctcatcgtgggcagctctgtcgggggactgctgctcctggccctcatcaccgccgcgctgtacaaggtgctccccgctgctcccccaccccctcccttcatcctctcgggcctcgcgctgcagctccgtgcctcggtttccccggcggggctgccagctgtgtgactggggcgagtctgggagcctctctgcgcctcagtctcttagggagggtggccgggttcatgcgcggggcgcgctgagaacgagtcgccctccttgtagtttctgtttttctccaggccccgacgcggatgtcactcccctcccgccccgccctcctgggtcccttctgtctctgccggccctcccgccccctccccctggtctgcggagccgcacgctccctggctgctgtcgctctcactgccctcctctgccccgcagctcggcttcttcaagcggcaatacaaggacatgatgagtgaagggggtcccccgggggccgaaccccagtagcggctccttcccgacagagctgcctctcggtggccagcaggactctgcccagaccacacgtagcccccaggctgctggacacgtcggacagcgaagtatccccgacaggacgggcttgggcttccatttgtgtgtgtgcaagtgtgtatgtgcgtgtgtgcaagtgtctgtgtgcaagtgtgtgcacatgtgtgcgtgtgcgtgcatgtgcacttgcacgcccatgtgtgagtgtgtgcaagtatgtgagtgtgtccaagtgtgtgtgcgtgtgtccatgtgtgtgcaagtgtgtgcatgtgtgcgagtgtgtgcatgtgtgtgctcaggggcgtgtggctcacgtgtgtgactcagatgtctctggcgtgtgggtaggtgacggcagcgtagcctctccggcagaagggaactgcctgggctcccttgtgcgtgggtgaagccgctgctgggttttcctccgggagaggggacggtcaatcctgtgggtgaagacagagggaaacacagcagcttctctccactgaaagaagtgggacttcccgtcgcctgcgagcctgcggcctgctggagcctgcgcagcttggatggagactccatgagaagccgtgggtggaaccaggaacctcctccacaccagcgctgatgcccaataaagatgcccactgaggaatgatgaagcttcctttctggattcatttattatttcaatgtgactttaattttttggatggataagcttgtctatggtacaaaaatcacaaggcattcaagtgtacagtgaaaagtctccctttccagatattcaagtcacctccttaaaggtagtcaagattgtgttttgaggtttccttcagacagattccaggcgatgtgcaagtgtatgcacgtgtgcacacacaccacacatacacacacacaagcttttttacacaaatggtagcatactttatattggtctgtatcttgctttttttcaccaatatttctcagacatcggttcatattaagacataaattactttttcattcttttataccgctgcatagtattccattgtgtgagtgtaccataatgtatttaaccagtcttcttttgatatactattttcattctcttgttattgcatcaatgctgagttaataaatcaaatatatgtca

SEQ ID NO: 189 - DNA, 12178 bp, Homo sapiens
ggcccacagaggagcacagctgtgtttggctgcagggccaagagcgctgtcaagaagacccacacgcccccctccagcagctgaattcctgcagctcagcagccgccgccagagcaggacgaaccgccaatcgcaaggcacctctgagaacttcaggtaggagaaaagcaaactccctccaacctcttacttcgggcttaaggcagagaactcgcctccccagaatctcctccctccatgatcccccgctattcctctattttcttttcctcggacctgcagccttgggtcgaccctgccctaggggtgactgcaggagagcagggaggatggtcaggcgtcaccaacaaccccatcacccagtaacaagaaccttgactctctcagtccctctgcatcaagacacttacccatttcccacctcatgcctgctaacttgaatgaaacaatcgctgggaaagcattaagagaattaaggctgggcactgtggctcatgcctgtaatcccagcactttgtgaggctgaggcaggcagataacttgagcccaggagtttgagaccagcctgggcaacatggcaaaaccctgctctcccaaaaaaatacaaaaattagctgggcgtgctggtgtgcctgtattcccagctacttgggaggctgaggtgggaggattgcttcagctggggaggcggaggctgcagggagccaagactgagccattgcacccagcctgggtgacagagcaagaccctgtctctaaaaatgaatgaaaggaaggaagaaagagagagaaagagagagaggaaagaaggaaggaagtaaagaagaaagaaagaaagaaagaggaaagaggaagaaagaaagaaaagaaagaaaagaaaagaaagcaaatttaaagcttatgcaaatcaaagatgttgtgataattgataattgagtctgggctaaattccccctgggctgcaaaggcagagagtggtaatgacttctcacctgcttttcttctaaggcttttttacgggacacagagggaagggagatggactggattccaagattcccacagggcaagatgggcgaagactccctgccactgcccggggataagtcagtctgagtgagacggagtgggatgggcttagaacctgaacatgtcatggtctcttcctgcaccttgccctagtgttcacttaccacctgcttgcaggaaacaagaagagcagggcccacagctggccagctcccctcccctcccgcctgtcttccagaacgattccttcaccagccctctttccattgctctaggatgcagatgtctccagccctcacctgcctagtcctgggcctggcccttgtctttggtgaagggtctgctgtgcaccatcccccatcctacgtggcccacctggcctcagacttcggggtgagggtgtttcagcaggtggcgcaggcctccaaggaccgcaacgtggttttctcaccctatggggtggcctcggtgttggccatgctccagctgacaacaggaggagaaacccagcagcagattcaagcagctatgggattcaagattgatggtgagccacgggacaccaggggaggtgggtggcatgcagaacagacctaccagaagccaaggaaaggctggctctggcttagccgagccaagccccatacagctgtgctgcaggggccaccccatcttcttcccactacactccaagtcactggacccttgaatctccaagggtgtctgaccagtagatttaccgcttattcaccaccgtgtgatcttaacctcgttaagtttgcccatctacaaaatgaggattatttgctgtcctaaagaattcatgagccgggcgcggtggctcaaacgcctgtaatcccagcactttgggaggccaaggcgggcggatcatgaggtcaggagatcaagaccatcctggctaacacagtgaaactccatctctactaaaaatacaaaaaaaattagccaggcgtggtggcaggcgcctgtagtcccagctactcgggaggctgaggcaggagaatggcatgaacccaggaggcagagcttgcagtgagctgagatcgtgccactgcactccagcctgggcgacagagagagactccgtctcaaaaaaaaaaaataaaagaattcatggaattacacttgtgaaatacttagcatagccatcactataggaaaaaaatctaaggccaggcacagtgcctcatgcctgtaatctcagcactttcggagtttgaggcaggaggatcacccaaggctaggagttcaaggccagcctgggcaatacggtgaaaccccgtctctaataaaaatataaaaattagtctgatgaggtggtgcacctgtaatcccagctactcaggaagctgagacacaagaatcactttaacccgggaggtggaggtggcagtgagctgagatcacaccattgcactccagcctgggtgacagagtgagacctgtcaaaaaaaagaaaagaaagagagagagagagagaagagagagaaagaaagaagaagaaagaaagaaagagagagagagaaagaaagaaagaaacaaagaaacaaagaaagaaaggaaaagaaaaaaaaaactaaggccaggcaaggtggcttatgactgtaatttcagcactttggaagattgaggcaggaggatcacttgaggccagaagttcgagacaagactgagcaacagggagacccctgcctctacaaaaaaatttacaaattagccagatgtggtgacacatacctgtagtcccaactactcaggaggctgaggtgggaggatggcttgagcccaggagctggaggctgcagtgagctatgattgtaccactgcacttcagcctgggcaacaaagggaagccctgtctgaaaaaaaaaaaaaaagaaaaagaagaagaaagaaaatatttagggttcatccaggaggcagaggttgcagtaagctgacatcgcgccattgcactccagcctgggagacaagagcaaaactccaactcaaaaaaaaaaaaaaaaaaaaaacaggaagaaaatatttagggttcataatttaagaacagagaaaaatattctagcccaaagaaagggttgggatctgagacttttgaagaaaggaaggagatacagaaaagagatttcatcctggaatgaaatctccctccagagagccctgggaaagcacggtagcccccatccatcagagtggagccccttgtgggggaagtgggctcggctgggaaccctcaattcagcataagcctcacatgtcctctcctctctgtcccggtgcagacaagggcatggcccccgccctccggcatctgtacaaggagctcatggggccatggaacaaggatgagatcagcaccacagacgcgatcttcgtccagcgggatctgaagctggtccagggcttcatgccccacttcttcaggctgttccggagcacggtcaagcaagtggacttttcagaggtggagagagccagattcatcatcaatgactgggtgaagacacacacaaaaggtgagcaggcagggaaaggaaacccatttcctgggcctcaagagaaagggaatttggaaataaatccacatatcccagttgggtgcagtagttcacacctgtaatcccagcccaacactttgggaggtctaggcgagaggaaggcttgaggcctggagtttgagaccagcctggccaacataacaagacctcatctcttcaaaaaatttaaaaaccagccgggcatggtggtgcacacctgtagtcccagctacttgggaggctgaggtgggaggatcacttgagtccagcagttcaaggctgcagtgagctatgtttgcaccaccacactccagcctgggtcacagaacaagacctcatctctaaaaaacaaacaaaaaccaaatccacatatcctaaaaaatgctccttttcagcattctcttctctatggacaaagggctggatgctttaagaaccaaatcttaggctgggcacggtggctcacgcctctaatcctagcactttgagaggccaaggcgggcagattgcctgagcacaggagttcgagaccagcctggccaacatggtgaaaccctgtctctgtcaaaaatacaaaaaattagccaggtgtgttggcgcatgcctataatcccagctgctcgggaggatgaggttcaaagaatcacttgaacccgggaggcagaggctgcagtgagctgagatcatgccactgcactccagcctgggtgacagagcaagactttgtctccaaaaaaaggaactagacgggttcatttaaacccctgactgcagccctttgacatacatccaattgaggactggggactccgggaaacatctaaaaggcttaaaaactttgtctaacttcagccgggcatggtggctcacacctgtaatcccagcactttgggaggctaaggcaggtggatcaaaaggtcaggagtttgagacgagcctgaccaacatggtgaaaccccgtctctactaaaaatacaaaaattagccaggcatggtggcaggcgcctgtaatcccagctattcgggaggctgaggcaggagaattgcttgaaccccggagacagaggttgcagcgagccgagatcgcgccactgcactccagcctggcaatagagtgagactccatctcaaaacaacaacaacaacaacaacaaaatcgtctaacttcctgatcttcctgatcattgattttcccataggtatgatcagcaacttgcttgggaaaggagccgtggaccagctgacacggctggtgctggtgaatgccctctacttcaacggccagtggaagactcccttccccgactccagcacccaccgccgcctcttccacaaatcagacggcagcactgtctctgtgcccatgatggctcagaccaacaagttcaactatagtaagtccaagagccccttccccacagcccacagcaactgcatctcattcctggggtctcccaaggaatacccaaaatgtcaccctctgagggaggaagaccacagggaatgctcccctttaagggaggagagaccctagaatatactccagctttgacaaagatttcccaagcaggagacatcaggataatgggaacagaagacaggaggtttatcccatgaaggatgaagaagctgaaatccagagattccctcagggccacatttgtccacctgactccagggtctcatcttcgtgtgttgctagtgtgattacctggggatgagaaatcctgctgggggagttgaggttaagaggatgaggactccaggtgctgtggctcacgcctgtaatcccagcactttgggaggccaaggcaggtggatcaggagtttgaggtcaggagtttgagaccagcctggccaacatggtgaaaccctgtctctactaaaaatgcaaaaattagccaggtgtggtggcaggcgcctgtaatcccagctactcgggaggctgaggcaggagaatcacttgagcccgggaggtggaggttgcagtgagccgaacgaaattgagccacttcaccccagcctgggcaaaagagtgaaattccattcaaaaaaaaaaaaaaaaaaaaaaggatgaggactgggatgaactggtggctgggtgtggggaaaatggaagtgaaggaaggccaaaagagacagagaaggcctggcgcggcgactcacgcctataatcccagcactttgggaggctgagaagggggattgcttgaggccagaagttgaataccagtctgggcagcatagcaagaccctgcctctacaaaaaaaaaattttttttaattagccaggcttggtgacatgcatctgtagtctactcaagaagctgaggtgaggccaggcacggtggctcacgcctgtattcccagcactttgggaggtcaaggcgggtggatgacctgaggtcaggagttcaagaccagcctggccaacatggtgaaaccccatctgtataaaaatacaaaaattagctgggcatgatagcaggtgcctgtaattccagctactcaggaggctgaggtgggagaatctattgaacccgggagggggaggttgcagtgagccgagatcatgccattgcactccagcctgggcgacagagtgagactccttctcaaaacaaacaaacaaacaaacaaacaaaatacagaagctgaggcgggaggaacatttgaaccggattcggaggctgcagtgagctatgattgcaccactgcgctccagtctgtgtgacagtgagaccctgtctcttacacacacacacacacacacacacatgcacacacacagagagagagaaattagaagatactgaattggcagaagagaagggaaatagaaattaaaatactgaataggggagcagtgaacaggggatacccaaaagccaagagcgagagagagcctggcttccagaaatagtggagaagccaggagaactaggtgaaaacccagtgctgggttgccatcagcgagagctggagccatttccaacgaaccatcttgtcgtcttcacagctgagttcaccacgcccgatggccattactacgacatcctggaactgccctaccacggggacaccctcagcatgttcattgctgccccttatgaaaaagaggtgcctctctctgccctcaccaacattctgagtgcccagctcatcagccactggaaaggcaacatgaccaggctgccccgcctcctggttctgcccaagtaagccaccccgctatctccccgacctaccaacccctctctcctggctccctaaagtcaccgcccccaggttgaatttcccagatctgtgatgcttgcaggacatgcatgtgtgggaggctgatgggaaactgtggcctgggtttgattatgagtcttgcaatcatccctccccctgtttctgctggagggcaggggacagctcttcctgaccacacccccacattgactatccccagaatacccagcaaaagcccccaaaaggagagtcagagaaatgagggaggtgggggcccaatcagtccacatctacttagggtcgccccatcagcacttccatccccaaccctttcaagtcaacatccaaacaaaagaaatcacttccaaggacggagcagctcaaagcgcagcttctagctggggttccaagaaagcagatttttcgaaatccttctgcagaaggaagcaaagagattttttgaaatctttctgcagaaggagaaggctggagctggggaactccagaattatagggaagcctcccaccacgctcatcccaaatttccggatgctataatgccaggcttggggaaagaggagaatttagttggttagctggtgcgtgctctcacttgcatcctctctcttcctcttttttttttttctcctctctctctggctcataaaaatggaggtaattagttgtgccctggtgagaagcagagagtgcacaaaggccccctgcttgagtcctcttcagggttagctctcagaaacacaatctgcagaacagatttttgttccaacatccttgcaggagaatttgcccttagcttcccccaccccagccaggctgaataaaattatgctgaaactactgtcttatttgaggaaagtaattagtcataggtgggagggggtggggagattgcagaagaatgttcatgaatattaggattttcagctctaaggggggactttgtaaacagctttagaagaagaaccaggccggctgggtgtggtggctcatgcctgtaatctcagcatttggggaggccaaggcgggcggatcacttgaggtcaggagtttgagaccagcctggccaacatggtgaaaccctgtctctattaaaaatacaaaaattagccagccgtggtagcgagcgcctatgatcccagctactccggaggctgaggccagagaatcacatgaacctgggaggtggaggctgcagtgagccgagatcacgccactgcactccagcctgggggacagagcaagaatctgtttcaaaaaaaaaaaaagaaaaataggaaggaaggaaggaaaggaaaggaaagaagagagagagaaagaaagagagagagagaaagaaagaaagaaagaaagaaagaaagaaagaaagaaagaaagaaagaaagaaagaaagaaaaagaaaggaaagaaagaacgaacgaaccaggcctccctctccaaccttcacctccgtccctattctggccacttgattcgggggacacctggtaggggatggggaaaggtgggagctgccagccagaggggaccccggcttgagcagcctcttgctgctatctgcaggttctccctggagactgaagtcgacctcaggaagcccctagagaacctgggaatgaccgacatgttcagacagtttcaggctgacttcacgagtctttcaggtaagaagactttcctttgcattttctcaccccagtggactgcgggggcccctaagaggaaaaaggaacctctccttgagagcggcagctgatctaatcctgtatccacatctgtttcagaccaagagcctctccacgtcgcgcaggcgctgcagaaagtgaagatcgaggtgaacgagagtggcacggtggcctcctcatccacaggtgagtctggctcaggtgaggctccacgggtgtcgcctccatcgcccttcaggataactggtccccagacccggaaaggaccccgcagccctctcggcacagagcagctctgtctgtgctcagccatcacccactccccacctgtttctcagcctggaaaacgggcttgggaccatggaaccctgtttcctcgcctgatggctcctaagttccctgactgtgaaaaggcctcctaaagaaaaacccaagttgttcccacagtgggaagtaaacttaagaaacatgcttatcaggctgggcatggtggctcccacctgtaatcccagcgctttgggggaccaaggcaggtggatcacttgaggtcaggaattcgagaccagcctgggcaacatggcaaaaccctatctctactaaaaatacaaaaattaggcaggcgtggtggcatgtgcctgtagtcccagctacttgggaggctgaggcaggagaatcacttgaatccaggaggcagaggttgcagtgagccgagatcacgctgctgcactccagcctgggcaatagagcatgactctgaagaaaagaaagaaagaaagagagagagagagaaaagaaagaaagaaagaaagaaagaaagaaagaaagaaagaaagaaagaaagaaagaaagagaaagaaagagaagaaaagaaaagaaagagcttatcaataagcccttaaaggatttagataaatgtgtgtaagggaagagctgatccattgctaccaagctcctggaggaaaccaggtctcagaggatgtccctaaacttttaaggttcatattcaggaaaacaaacaacttccagctgggcttagtggctcacacctgtaatcccagcactttgggaggccgaggcaggaggatcgcttgagcccaggaatttgagaccagcctgggcaatataatgagactgtgtctctacaaaaattagaaaaaaattagccaggcatggtggcatgcacctgtagccccagttacttgggagactgaggtgggaggatcacttgagcccatgagttcaaggctgcagtgagccatgaaggtgccactgcactcccacctgggcgacagagggagaccctgtctctaagaaaaacggcgggggtgggggtggtgccagtgccagcatccctctgttctaagacattgtcccttctcttgcagctgtcatagtctcagcccgcatggcccccgaggagatcatcatggacagacccttcctctttgtggtccggcacaaccccacaggtgagcctggaacccatcacgttccacatcctcccacccattctttctctcaggaactagtcccgacagatgcagacatccctctatccctgagagggctctgggcagggaacccataaccctaccctgcttcctgtcccaagaggaggctaccttctatcacccacagacagtgccgggtccccgctctgtgactcaggcagctgcgactccagacagctcactcatctgcctagatctcagtccttccacccacatccagcctgatgagctgtcccactccttctgcttctcaacccccatggttcttccaccctcaggaacagtccttttcatgggccaagtgatggaaccctgaccctggggaaagacgccttcatctgggacaaaactggagatgcatcgggaaagaagaaactccgaagaaaagaattttagtgttaatgactctttctgaaggaagagaagacatttgccttttgttaaaagatggtaaaccagatctgtctccaagaccttggcctctccttggaggacctttaggtcaaactccctagtctccacctgagaccctgggagagaagtttgaagcacaactcccttaaggtctccaaaccagacggtgacgcctgcgggaccatctggggcacctgcttccacccgtctctctgcccactcgggtctgcagacctggttcccactgaggccctttgcaggatggaactacggggcttacaggagcttttgtgtgcctggtagaaactatttctgttccagtcacattgccatcactcttgtactgcctgccaccgcggaggaggctggtgacaggccaaaggccagtggaagaaacaccctttcatctcagagtccactgtggcactggccacccctccccagtacaggggtgctgcaggtggcagagtgaatgtcccccatcatgtggcccaactctcctggcctggccatctccctccccagaaacagtgtgcatgggttattttggagtgtaggtgacttgtttactcattgaagcagatttctgcttccttttatttttataggaatagaggaagaaatgtcagatgcgtgcccagctcttcaccccccaatctcttggtggggaggggtgtacctaaatatttatcatatccttgcccttgagtgcttgttagagagaaagagaactactaaggaaaataatattatttaaactcgctcctagtgtttctttgtggtctgtgtcaccgtatctcaggaagtccagccacttgactggcacacacccctccggacatccagcgtgacggagcccacactgccaccttgtggccgcctgagaccctcgcgccccccgcgcccctctttttccccttgatggaaattgaccatacaatttcatcctccttcaggggatcaaaaggacggagtggggggacagagactcagatgaggacagagtggtttccaatgtgttcaatagatttaggagcagaaatgcaaggggctgcatgacctaccaggacagaactttccccaattacagggtgactcacagccgcattggtgactcacttcaatgtgtcatttccggctgctgtgtgtgagcagtggacacgtgaggggggggtgggtgagagagacaggcagctcggattcaactaccttagataatatttctgaaaacctaccagccagagggtagggcacaaagatggatgtaatgcactttgggaggccaaggcgggaggattgcttgagcccaggagttcaagaccagcctgggcaacataccaagacccccgtctctttaaaaatatatatattttaaatatacttaaatatatatttctaatatctttaaatatatatatatattttaaagaccaatttatgggagaattgcacacagatgtgaaatgaatgtaatctaatagaagcctaatcagcccaccatgttctccactgaaaaatcctctttctttggggtttttctttctttcttttttgattttgcactggacggtgacgtcagccatgtacaggatccacaggggtggtgtcaaatgctattgaaattgtgttgaattgtatgctttttcacttttgataaataaacatgtaaaaatgtttcaaaaaaataataaaataaataaatacgaagaatatgtcaggacagtca

SEQ ID NO: 190 - DNA, 47536 bp, Homo sapiens
cgagggctcggccgtaggagccccgcgcactccagccctgcagcctccggagtcagtgccgcgcgcccgccgccccgcgccttcctgctcgccgcacctccgggagccggggcgcacccagcccgcagcgccgcctccccgcccgcgccgcctccgaccgcaggccgagggccgccactggccggggggaccgggcagcagcttgcggccgcggagccgggcaacgctggggactgcgccttttgtccccggaggtccctggaagtttgcggcaggacgcgcgcggggaggcggcggaggcagccccgacgtcgcggagaacagggcgcagagccggcatgggcatcgggcgcagcgaggggggccgccgcggggcagccctgggcgtgctgctggcgctgggcgcggcgcttctggccgtgggctcggccagcgagtacgactacgtgagcttccagtcggacatcggcccgtaccagagcgggcgcttctacaccaagccacctcagtgcgtggacatccccgcggacctgcggctgtgccacaacgtgggctacaagaagatggtgctgcccaacctgctggagcacgagaccatggcggaggtgaagcagcaggccagcagctgggtgcccctgctcaacaagaactgccacgccggcacccaggtcttcctctgctcgctcttcgcgcccgtctgcctggaccggcccatctacccgtgtcgctggctctgcgaggccgtgcgcgactcgtgcgagccggtcatgcagttcttcggcttctactggcccgagatgcttaagtgtgacaagttccccgagggggacgtctgcatcgccatgacgccgcccaatgccaccgaagcctccaagccccaaggtaaggctgcctcctcccacgtgcgcgagccgccccctccatcccccggccggagctgcaggagaacccgcgccaccctacgcccgcccgccgctgggtcccggtgctggggactgagggcccgaggttgctcgcatgctgtgcacgtgattcctaagcgcgtctggtctgtcccaggtatcgctcagcgcccctcgcgacccaggtgcacggcggggctggcccgggagcggcagctctgcgccttggcctcgcagggactcgctgtggtccccggagccgctcttcctgggatccaacttcgcctttcccatacctgaaacaaagccttgcgctttaaataacaggggagcttccctctcctctaggaggactccgagtccctatcgaagtttttaacctctgagacgggaggaaaaaacaaaaacccaaagcgtagaaagttcagaaaggccgagagaatgcttggagcagcttttgtttattttcataggttcgacaaagatttaaaaaataaaaccaagccctttccttcactggtcattcagtcaagtagccttgggattgctgcaaaactggctgagaaagtttaggaaccgtggggacttctgtttctccaccccttccaggtaccagctctgccctcggagggctgggggtggaaagtcttttctccctccctctagcgtaccccctgcttttctcatttacacaaatcctcagctcattagaaagataaaaatgtaattagctcattgttcatctcctcccggggagagcagctctgcaaaatgcagactttcctaacagcctgagggaccggcccgaggttcctctcaaaacccccttatgtttaaagagcaattcttgagggggaagaaaaaaaaatcctgggaagtcaaataaaatgaaatagatataaagataaaatatacacatcacagacctgacttctatagaagtaaattcaacccagaattctttagaagcgaagtttaggctctgaggtgtggagagggtcagggattggggagctgtaccccagctgcgcttagcacagacgcaggcttcctgagggctttttgaggagggcctttagggtgggggagaaagactgcctacacttagctcaccttaaagtgtctttaacctctgttattgatgctaaaagaggggagtgcagtcacctggctcctcagagtgaggatttgggcaggtgggggaaagggataccccaaattttagatgcttttgcttattctagggagggtggagatgggtccacagtgactgtcgttggatggctggatgggaacggcactgattgcccgcagtggccaggtctgggcaccgctgctctcagagtcaactctggtgttgggagtggagtgagggtagcggatgcatctgcactttgtgagcgagaactgagcagttacctggagcaaacaaagcgccttgtgttctgttggcttgcacccatcccctgcagcctgcgggaatttccttctccccttcctcagccagcggggattagcccagccctgccctgtgaggctgtgcccagccctgacctggagtccattcccaatggcttccgatggtctctttctgggaccgtctgcagacatgagtggacaccttagggggctcggctgcggaaaaggtgctgcagtccacagggaacatggggggattggacgggttgcctgaagaagagaggaaagaatccctcaccccagcccccaaaaggctgtgatgggatggggaaaccccataatcgctgtcttccggacaccttttgccccttggctgcagttccactggtcggcgcccttctcagcctggcttggaaccgtcctcactcacctccactcctcccagcagcgctcaggtagtcaccctcccaagacaggtctttgaggagcaaagagaaaagtggggagagggccggtcgggagtggggcttgggactggttttcccctcagtggttttggtggggggctctgccctgagatggcacaccaccctccccaggactgcaatccctggtgtaagggagccccacgtgatttcctgcgaggtccctgtggaggggagggtggggcgtgtgtgtgtgtgtgtgtgtgtgtgtaggtgtgtagagggcaggtcaagacaaaccagactactgatcctcataaccttatggcttgtggctgtggggtcgtaactggcactttccaatgagaataagtatgcatgcactactcttttattcgtttattctttatgcttttattctttaaaattaaaatgcattttcaaagcagtgtcatatctttgcatactggtttctgttcacacacttgggcaaattcagttttggattattggccagctgtctgtggtcatgtgttattaaggagaaacctgataatgagaaatgacttgacatttttcccctgcaaaggctgatacccaagccatagaagctcctgttagggaagaggcaattgctctttttctagggaagtcatttttgaatttggcacttccattagaactgtgaactcccaggctgatgcattgttgtttccctctctgcctggttttactgggtgaagttgtatgagccagcacattgggtttgattttgttgttgcttgggcatgttgtgcatttagtcagtgtggcagaggccacagagccctctgttccccagaaagccttccttagggctcccttttggtccccccaggaactggccagggaagattgtgggggttgtgtgtgagaaagggaaagagagaagaaagagagagagactgagaaagcacttgtgtgtgtgtggattgatgtatcacaaaaatcacttaatcctgattcagctgttgggctgtctcctccacacacccttaaatattaataaacacaaaacctttgctttttttgttcatttgctttaaacattattttaaatacaactgaaaacagcgatttagttccacctctcagaaggatgactgggtggatttctcctgcagaggcagcctgtagagccccaagacgcaccaatgaggcgcaggttaataccgcatcacacatttctctttctctctctggatcaggctgctccagagtcagccgttagaaaagctgagataggggaaagccgtggtaaaaacacacagagcccaccccaacgagctcctgccattctgagaggcactgaagtccaaatgtaattgacgggactgaggaaaatgtccctgagaagtgcagagccctccttggccgattggttcaggcgaacttcaagtgtccagaggagatgcagtgagtgtgtggagcgggcagagatgtgccctttatgtttggatcaccctgacttcactatttggtcaagattgtattcacagaacgttgctatgtgtgtttgtgtaactcccacttttcctttttcaaaataacctaaacaaggaaaacccaaaagcacagttcactctccttgtgcaagtaacctggtcctttccatattgtcacacttccttttccccatgtggaagcaaaaaccataatgcaaaatttgtggtaagttgtctcctttgtgagaattaccacctctagaacccagtctcaagttctgggtgcaaagcaaatttccagcatctgggctaaggacagtcatgccatcgtctgctgggagcgtggttcttaactgcactgagaatctggaaggtgtttgctcctgggtgcagagtaaaggtgggagaggaatgtgtcaataaaaactaaggatggggtctctgctgggccctgcagggaccctgtttggaagtagggagtggtctatgggccacttgtgtcctgagggcagccttgatctgggggtgctctgcaggtcccctcttctcttccacttagggagcctttgcctatttcaatgtctgagccataaggggggctgatggggagggagatgctgccacggaagccatggtggaggaggatgaagagcagtgggctccaagcacaccaagccccacctgcactccccgagtgcagggtcagcggtgactttcctgtgctcttcagctccagcctggcttggcctcctgtgctgtgcccgggggtggggtgcccctagaatgtgctcgtgatgttttcctagacagtcgataagctccaggctgcttgataggtgaaggtgatgacaatgatgataagccacttcagctcttggaggaaagcgccgtcctgctctccctctgtcctgggaagctggagtcctttacctccactggattttctgacttcagcagtatattggcttggaggaggcttctgccctggcctcagacatctcctcccaggcagtggagctgccttccaacgttatgcacgtctgcccccacaaacctcctcttcaaagcacttcacagttgcccaggaaagagcctctgaaggaccccttcctatccagccctgtcctcccatttggcagcgcctgttagtgccccaccccgcccgcctgccctggcctcctgctgcggtggcccttttggagaggaggtgttcaggggccgagagctggagtttgtgagtctggctgagtttctttctctcttggctcctggagacctggtcagagggatcagcaggctagctgggagtgtggaaatgggaagggggcaggaatcggaggatggtattgaaaggagaagggagaggatgggaaacaaacaccaggaagagatctctgtgggtttgtaagccagcttttcccggcactcacagcgccccacaagtcatcattcatgtgacctgcacccacccagcctcaggttatgctggcttaaataactgtgtcacatttagcagctctgggccaaaatgtttcaagaaacctgcgcctgctctggttgtagaccctgggctcaaggcttcttgttttcaattctcaggtccccttcagaagttccagaagacctttagccactttcagcctggacccagggccgatcttttccccaggggctgctcccttcctgctctgtaacttacagttccgtttctccctacttcctttcccaggcacaacggtgtgtcctccctgtgacaacgagttgaaatctgaggccatcattgaacatctctgtgccagcgagtttggtaagaaagcgtttctagctgcctctggaaggtttggaacctcctggtctgtgcctctgccagacggaggccctgctgatgtatctcgttgcagctttccatattctctacctcattcctctccaaatggctgcttttctcaggcagatgggagactagacagggtccagaaccggccagttttgatgaaggccatactttgccctcctttgtgggggatcgctggacagatttttgggcatcttctctaggcatgcagggaggctgatttggggacaggtcgagaggagcagggaaggacagcagctccttctcagaagctgcagggagtacaagttgccacctgctactgtgtctggttgggcccggttttttccggactggctctttttttttttttttttttttaacatctacccctaggtgtcagcatgactctgtccaggatttaaatggctgccctctgggtgccttcccagggaggggagagttcaatgcttaggggattcagagtgggggtcctcatcaggttccgcgaggcaaagaaaaatggacatccccacagcagggtggtttttctctcttcttcccaagtcactctccatcgaaagagaattctgaaccagcactcgcagctccaggagaaggaggagctggtgggggccagggggaggtgggggagatgccaggggccttggggccttccagggatggtctgttatagtctgacctgcagaatacctgaattcaccacaccctgagagtctctcctctgagaaaagtaaatgtaaacggcacccctttggagggccagctccctctctctcgcctctatctgacatggatgcagagaagtggctccggccaagccacactttcagaagactcagtgtgatgctgaacaacgtgtttctcataattcctgccttgtgtccctgagatcggatttcttacagaattcttatctggaaaagcgtaaagataggtgatgtgagtccattcggaggcatcccagtccatgttttcattaatcgaacatggtaaagtacacggaagggtcttgttcctgccctgtcaaagtaagctgcacacatgtgggaggacacatgcaagtcggagggaatcatgcctcacgacagggtcattctcagggtattgcaattgtggatgaagatggaagctggatgtagatggccaccagagctaaactggagagcgcgtatcctgtttccatgcatggggaagattgatgtgttctctgtgatgcagcagtgtgagttacttgtctgtttctgcattaactcaaattcatcagtgaggattccctgtatacctagtgctttctgagttctatagatacagattgagggtggaactcttcctctaaataaatgtaatacatgagtattgttttttaaaaaagacagaagttggaggattcagaccctttgccacataggctgaagaggcaagcctgggaaagaatttgaatctggcaaggttgaccttaaggtgtagggcaggggtctagagggcactcaggtaactcatctgggatggacatcttcttcccacggcagcaggcacctgccaaatcagccagcgttctgtacacagaagaggacagaggatctcatgtcgataaccagtcacggtttgtggaatctgagtgattagctgtttgggattgggttcctttagccctgacaatattttcctcttgggttcacagaacttttgggttcctcctggacctcagaggtcatcttatccagtcctcttatttgataaagaaggaatttgactttctcaactggagtccttttacactctgccacctgccctcctcacttaagagttgatgcacagccgctgggctctgccacggaggcgctgacctccttagtgtgcgtatggtgtatggcaggcttctttgagctggttgcaggagaaacctttttgtttttttgtctgtaatgttctcataaaacaatatatagggatttttttttctctctctctgtaggggctgagcttagctctgcccttcttagcaccttagagaatgcagccttgtcgagaaacgtgtttcctagctcagctcacttcaagtaagtgaggcagtcagccacactgatgggattcagttaggaaacaaagaaattgaacaatgcaagctgacacacagcagagaagaaagagaatgcttgactccctcctccagggatcaaactttgcattaagtggccctgacatccccagtgggaagacatcaggttgctggaaggctctctgtgagctccgggaacaaggggtgcatttccctgggtaagcagcaccctcgtccccctgccactgcatctgtggtctccgggagcctctgtggagctgggcatgtctgacccctgaccttctcggcatgcagtgtgctttaaccccttggcagatctgcttagtcactcatgtctccagccctgcactgtacctgctcagttcagggcacattttttccccaacaggaaaaaaacatgagcagaaaagcttgtgtgctgatgctcaggaatgcagctgatcagcctggatcaagcaccagatgtgggagccaagacttagatggggcaaagtcaccgcatcgaacatggcgaccagcctgcctgctggcttccatcagcttgcagggctctgctttttgttctctctctgcttttcctgctctgtgacaacagggtgccactctcgcctcttaaatagcccaatatagtatttgcgagccgccacactaatcatcctgctgttaacagctcagtacccacagccgtcttccctttgggttggtttatcccagggatatgaggatctgatttatttataattgtggtgaggttaattcctgcctctggccactttctctagcttcttctgcagtatctgtaaacacccgtaagctttcctgggggaaatttgcatggtgatacacttctgctaggagagttcagagcttccacttgtactaccttcttcagtgttttgagcttgagagttcaggtggcaatttcttcagcccagtattttctccctatggaaaaggatttctttgcccctagaaactttccttgccttctggaaggattcttttttccatttatatatttcctcataaagagaaaagctgtactatgcaacactaaggttagtcaaataggaaggaaaagaacatcagctttcacagttagcattagggagtatttcctagtagaaatattttcagtttcccgcacctccgtacctccactaatctgttctcactctgcctccaacttctttcaggatgtcttggctgtgctgctgtttgggggacagtgttttactctgacgggcagtttgagttcttgcagaaagtaggctcagcctttccaaactaaaccttgggtttcctcccaaagatgaagcaagatggctgctagcacagtcactgcggcacctgcaggctgcctgagagcaggctctgtatctaatgccgtgttttacctggtgggagatgcctgttaattgtgagacacactgttcagtttgtactactgacaaaacaaaaaacaataaaaaaaccatacttcttgcagaaatgtgcagaaaatctgtgtcttggaatgaacaaagtaaggcctatttgcactcaaatagtccctggcacagtgtcttatacatggtaggcataaaatgaaagtttgtcagctgactgtatgaatgacaggggatgtgggacgtggatgttggaattttttttttttttttttttttgagactaagtctcgctctacctgggctggagcacaggggcatgatctcagttcactgcaatctccgccccccgggctcaagcgatccccctaccttggcctcccaaaatgctgggattgcaggcatgatggacttctttttttttttttttttttttttttttataaaggagaaggctcttttcaaggtggatgtcggcaacttgtgtattaagttcaaggaaaactacatgccctgttttgggtgactgagcatatacatgtatacatgtttaaaagaagccccaacatccagaatctcattcagtcaaagtaaaattagacatggaaggaattgttactctggggatggaattgataggtggaaaacaactgggttttattgttgctgaagatacatattctatccacagatctgtacaaaatggagctaattgttaggatattttatgtgcgtaaaaacctgagattggcccattgcttagtgcactagaggtgtgagtcccagctgagagcctgtgtctctttctgagcagccttcttgtgcatgggaggtggggggttgggggggtaggcggtgaagagatggaggccgagccagtgtttgtccttttgcatctggcttatgtgttatgcatcatgtcctcatctttggatatgactatagactctcataagaaggggagtggagagaaggatttgccctcaagttcacctttattttctgaggtttttctggaggtgggtagagaaagagggaaaagggatgagtgggatgagggggctgttcacagctcatgtgaactgcccatttctttgggtgctgcgttgctcacctgtaccacttaaaatttttttaatggatacaaaatagttgcacatatttatggggtatgtttgatattttgataaaagcatccaatgtgtaatgatcaaactgggtaattggggctgggcatgctgtctcacatctgtaatctcaatgctttgggagggtgaggcaggaggattgcttgaggtcaggagtttgagaccagcctcaagaccccaggcaacatagtgaaaccccatccccattaaaaattaaatattaactgggcatggtgtcatgcacctgtagtcccagctacttgggaggctgtggtgggaggattgcttgaacccaggaatttgaggctatagtgagccatgatcacaccactgtactccagcctgggcaacagagcaagactgtctcaaaaaaaaaaattgtgtaattgggatatctaccacctgaaacactgatctttgtgttggaaatgttccaaatctagtcttctagttaatttgaaatatacaataaattattgttaactataattgcctagctgtgctactgaagactgtatcttattctttaaaaatacggaacacttcacgaactcacgtgttatccttgcatggtggccatgtgaatcttctctgtattgttccagttttaccatgtgtgctactgaagcaagcccctgtaccactttgccattgtaaagctgtgttgagttggataggacctcaaagatcagccagtccgtgccctcacgttactgactgaaggaaataagacaaaaaaataaaggagttaggcattcagtgacccaagagcactctacctggatccctgttactgcccaccagcacttccctggcatccaggccagattgcacacccttgctccttcccatcctctcacacccatcaagcaggaaggtagttgaggagcttcctgggaaggggcatcgggtgctcctttactcttagggtttgtagaatttaaatggactgatgtctgtgcccagcacacggaaggagctcagcaatcattggctcccttcttggtgggaaagccggcagtgtagcagaatggaaagaacacaggctctgggcgagacagacttggattaaatccctaccctataagctaagcgaccaccagaaagtctcttaacttccctgagcctggctcctcatcagcaaactatggatgagaattcctacgtgactgtgttgggagaattggatttaatcaagtgtggacagttcctggaatatggtggctgttcaatctgtaataattattatgtcttcttattggaaaaaaatgttttaggatgaaatttagcctaggaaggaaaattccagcactaatgaaatcagcttgttgggcggaaagttttttaggaagaagaatggaatatgctagttaattctctggttaatggaggattaaactgaagaagtcttttaaaaaacccatttggaagacctttaaaagctttaggctgctgggcacggtgactcacacctgtaatcccagcactttgggaggctgaggtgggtggatcacctgaggtcagaagttcaagaccagcctggccaaaatggcgaaaccccatctctactaaaaatacaaaaattagctgggcatggtggcaggcgcttgtaatcccagctacttcagaggccgaggcaggagaatcacttgaacctagaggccaaggttgcagtgagctgagattgcgctgctgcactccagcctgggtgatagagcgaaactctgtctcaaaaacaaaacaaaacccacaaagagaactgctttatgcagcttcaaggtgctgtaattcacaataacaataacaaacaactccccctcggaaagccaaaccctaactagaagttaggagatctgggttttagtgagatgacatccttatgtcaacgtaaacctggaagcctccagacagtgatgagggctgaatgcgggagctgtgactgcctggtgttccaggataggaccactgaagttttcatttgtgtgttttttagaaacactctacctaacgcgttctccttttaatttagcagggcctatgtttgagggacttcagagcccctttgtgctgttttacttcactttgttctccatttttctccagcgatatctctggggcacttttcccttcccctaccccaaccccaacacctgccttgtgatattcacttcctttaaccaaaaaataggctatgcattataatgcgaatgagcttttaaatattggtaagtttcatccagttttgcagaaatgtgctggaagccccaatctgtttttttttttttttccagaagaacaaatggccaaagaaatgtcagatcattgccctgccccgaccttagggcagccaattaaacatgccttcgctttggaaggcttctcaaaggcctatagattgtgcttgaaatctttgtttagtctttcaggaacactgtcacacggatgatttatcaaagaaagttgtttatctggcagtaaaataaactctgggcctgttcagactaagatttcccgtgaatttttaccaaggtaaacactactaactggcaggttgcaaactccgtgtgaaagccagacacatataatacatatttgaactacagctttgctgtgtatggggtctggcctgccactagtgctgtcactcccactgtgcccagaggacctggactgcagtctgtctggctgggtgaccaagaagagggacttgccccatagtcagtgtgtgcaagagccacccctgtagcgtgagcctccctgggtttgagtgcctcttactgctggcacctggggacttcctaattcaaagggggcaggctcaggatggttgccctccgcatcccacaaatagttggtgatgagttatgaggaaagtgaaccagaagcagccagcttaggtttctttgaaaatagacatttgttgatccacattggcagggggctggacgtattgactgatctgggagctggggccagggcatggtggcagggggtgaagtcatcttctggattctgctgagtgttaatgacagtggcaaaaaaaaaaaaatgctgcagatactcccccagtgtctctggctttgctagtgggtggctgtgagagacccatttgggaattaggtaagttgagttctgtgagtgctgcagcgcatatttaagtgagagggtggatggacacatgaatggtgatgatggggacgagatgaaatacagccttccaggtctttccagggaaggtactgtagtgaatttttttttttttttgagacagcctcttgctcttgtcgctgaggctggtgtgcagtggtgtgatcttagctcattgcaacctctgcctactgggttcaaggaatttttctgcctcggcctcccgagtacctgggattacaggcgcccaccaccatgctcggctaatttttttttctttttttttgagacggagtctccctctgttgcgcagactggaatgcagttgcgtgatcttggctcactgcaacctctgcctcctgggttcaagcaattctcctgcctcagcctcctgagtagctgggattacaggcacgcaccaccatgcctggctaatttttgtatttttagtagagatggggtttcaccatgttggccaggctggtcttgaactcctgacctcgtgatctgccctccttggcctcccaaagtgctgagattccaggcgtgagccactgcactggcctgtagtgattgttgatagtggttttttcagggagactgctggattataaactgcttgttcttacagtcccagccagctccagatgctggagtttccatatcacactagccttggggttcttcctgcagggctgagtttaaagatgattgtgggtagctcccataactcatgctgcacgctgggtccttctcatcccaactcctcaaagcggcaggagcaggaactggggactcctgagagaaggtgacatttgtgtctgtgtgggcttttggggttgggatctcggtgcatgtgcagagcttccatatacatatttgagtcttgaatgtaaaaggtgttggtctgttaggtttggggggctgtaagcatgagggctgaggctatttgacagcacttagggattgatgtgcaggtaatagatgcttactggcttggcagatatttggaggcataacagaggtattttctgtagggcaggaattaagggacatcatttacaaattctgaaaggatgtctgtgagttgtaaagagatgccaaaatagtactttggcagtggggagaaaacgagaaaccagcttccctaaatgatgttctttctcattcaggcaggattacgagggggattttctctctcttgttttctctagcccttccatcagctttctccaaaggacatttccttttgggactacctcagatgtgttctcttctctttgtgagctctttgaaaattttccacgtcggtgtcttccgcaatggatgcattcagctttggggaatggcttatggctgaaggaaatccccaactatatgtcggtggcaccagagctagaaacgagcctggataagcactttaaaccctgagagcagctggtgcctagagagcgcattccctcctgtggtactccatagggcggctgtgccagcccgctgtgctcacctctcaggctcatagacagtctgggcgccttccacttttcctttggtctcagccccatatggaggaccctgttcctgccctcgacacatttaagaatctggtggccaagtatggtggctcatgcctgtaatcccagtgcttcgggaggctgaggcaggaagattgcttgagcccaggagttccagaccctgtctctaaaaaaaaaaaaaaaaagtagccagatatggtggcacattgtggtcccagctacttggtgggatgtgcgtctgagcccgcgaggtcgaggctgcagtgagctgtgttcaggccactgcactccagcctgggtctgagacagggcaagaccttgtctcaaaacagaaacaaaaacaaaaacaaaaccccccacaaaacccccaagaatctggtgggcgagacaggcctttgccatgcttttttgtctctgctctttggtaacttcagatgcctttgtgcgtagttctagcactcaggactgaaggagggaggggtcttcggtggggcctggagaaattcagggaactttcctagagaagatgaggatctaactgtcaggctgaagattaatggagaaagtagaggagggcattcctggtgtcaggagatgaggacagggaaagggagtaaagactcaaaacaagtagtaattcttcaattgacgaaacctaagctggtaaataaatacagaggagaatgttggtttgtcatttgtcagttataacaactcgcttcgcattctatgttctgcttagccctggcccacagcgtggggactcaaaggctgcatcaaggcatgggagggggagctgctccttccaattcgcagctgtctgtgtacccagctcaaagggtgacgaggtcccagcaaggctgtacctgttcttgtggtgcagcagttggaatgaatggcccatgtgtttcaggggtccctcatgtggttgtggccatgggcctgagtcagatatgacacccagggagtgcatagctgtgaggggaaggagttcagtcaggtaagtacttgttgtcagccctgggcaaggaaggtgctgagaagtgcacaggcaagacttgagtcttgagagcagcctctcacctccacgtaacccgcagccgctgcttccactcacaggatgcagggctggctagaaggagtctcgacctttgttctgagatgtagaggcactaagagctgagatgtctgcacagtgccaaatgccagccggcacccagcctctctggttacagggtctttactcttaacacacattcatttaaaaacaggctcatgatgtgtgtttgtgcatgtgttttcttttgaaaatctaaccacctgcagaagacgtgcactcttgcagagatgattcaacaatcgttgggcttctactgagccctgcttagtctgtaccacatctgttgactagaatcaacatccaaagagattttagctgtgtagacagaagtgttgatatcatttcttcccagggcctgggaagagggaagtctccataattgtattagtttgttctcacactgctataaagacactacacaagactgaatactttataaagaaaagaggtttaattgactcacaggtccacatggctggggagatctcaggaaacttacagtcatggcataaagggaagcaggcacatcttatatggtggcaggtgagagtgtgtgaaggaagtgaagggggaagatccccttataaaaccatcagctcttgtgagaactcactctcgtgagaacagcatgggggaaactgcctctatggtccagtcacctcccaccaggtctctccctcaacacctggggattacagttcaaagagagatttgggtggggacacaaagccaaaaagggctgctatgggatcttcgctgcaaagaattctgcagctgtctcctccctccaagtgctctgaacccgagttaagccctgggtaaggaaggtgaaaactctgttggctatagatagctcttacctgcacacctgagtccaggagtggaagtttttagtggtgtaattctgcctggggtgtgttgcttttgaagttgcgttatgagtgggaagccctgcagtgagcctcgggctggccacgtaggagctggtgagttttggaggagagggtgagggtgtctgtattggggtgcccctggccacactagggtacctcgctgtccccactcctggggcctgtttgaggcagaagctttgggtttgtcacaggcttctccaaggtgcctctgtccgtgctccagccctggatcacagtgcctttgtgctgctcctcatggtgtttcctgcctcgggaaggaaacacctggattaacctaatttcatgttagtgtcagagacccagtcaaggctgactgcgtggtgtgtgtgctgggctccgcgctggtgagtgtccagaaaatggtcatggggtgtgattgggaagtggttctgctctaccaggccttaccatctagaggaggtcaggggatgcagagatgcccgtgatagagaagagctgggagccacgggagcatacagaagggagctggtctccaaggaaatggtcaaggggagctgcagagatgagagaccctgtgctgtcctccatggagctggtaggcatttgtcaggcagcaaaggtgggcctaggaagataatcccagtggagatcagaccaggagctgcgacgctgcactggggagtggcgaatctctttgtggttagctagcttatcagggtgtggtggtgagtatctagaaatgatgacaaaacaggcaaaagccagcttgtgcggcaacctgactgctttcttacagaatggagatttggccttgttggtaacacagagacactgggaacttattttaaaacatgactgtcttatatctttaaaaaagtcctcaaaaaaggccgggcgtggtgactcatgcctgtaatcccagcactttgggaggctgaggtgggcagatcatgaggtccggagatcgagaccgtcctggctaacatggggaaaccccgtctccactaaaaatacaaaaaaaaatagcggggcctggtggcgggcgcctgtagtcccagctactcaggaggctgaggcaggagaaaggtgtgaacctgggaggtggagcttgcagtgagccgagatcgcgccactgcattctagcctgggtgacagaacaagactccatctcaaaaaaaaaaaaaaaaaaaaaaaaaaaaaaaaaaaaaagacgaggaagaggaggagaagaagacaaagacctcattaatcaaataatgaagtcctaatggcagaactgcagacatcagtggtgagacattttggacagggagtctctgagtgagggtgggagggagagaggagccctggagccgcgtcccgtatgagagggctcagggtggtgcctgttgggtctgggcctgctcagggccacccacttgaaggagccctcgggaggtggctgatgaggtcagcacagctgtcctggccgtcagggaaggggccatctgctgcggtcagtgcccccgggacacctgtgttctgcgtgtgcagagcgggagccagagcctgtaatcagctcatacttaggtcaccgcagagctggccattaccaagagcagttgtcattaggacccatcataaatggtcctgacttttctctccagactttgttattgaccaggggcagcaggagcagtgcctccggagccagccccaaagcattgcactgggaatggcatttatgagggccttcagggctgggttagcccaggtgtctggagcttccctgaaagagggaggcaggagaggctgcagtgacaataagggacaaggggaggtgcatgtgtggtttgtgtgtttatgcctctgtgcacgtggggttatatctgcgagatatgggtgtctgtcgatgcctatgtgtagttgggggacacaagggaccacctgctgtgcacacatgtgtgtttgtgtctgtgtttgcctgtgtatgggtcagtctgtgaggtgtgggtgtagacagatgtgggtagtgtgtggtgtgatgagctgtgtacgtgtgccctcctgtgcgtctgtctgtgtgtgcatagcacatctgcctggtgagcctggctgtgctgggcagctgccttttccagctggcctgggcttcccagggacttggtctccactggtgaggcccgagggtcacttcctcccccagcacttgagagagacactgtctagagcatgctgctaatccactatcctccagaagagcttctgagaagcccaggagggatttctctgcattgatgccattatacaaactgagtgccatctttgtaagtttggggaacactcctatggtcttggtattttgtttattactttgagtgccaaatagacctcttttgtttaggtttcagtgtttgcagcaagtccatttagaactgctggttctctgggcaggagtcacttccttagaggattccagcggttagcagggattgacataaaggcggtgctgtaatctctaggatttaaagagtgcattggaaagaacacgtgtagccttaggagctgtacaggcgtgagcccagcgcctggttctaccacctactgtgtcagcgcctgcaagtcactgaagcactcggtggctcagtttacccacctgttaagaaacaaaaacaaagacttctgcgttagaagataaaatatggagtaagaaaaaaataacacagattctggagtcctggcatctaatttctgcgctgctactgaactgtttgtgactttggccagtcagttcaaatctctgagcttgtttccttaagcgagttgaaggggtcaccataggtgatctgtgagtgtcctccagctctgcagttaggtggttttggtctgtggcaaaaactctgtgacttgctctctaggtgtgatatcttggttggcacctcctgctccccaggcaaggcccctgggaacactggccttcaccttgggtgcatggggaagagaagtcgctatgtgcctgagagggtggagcagatgaaaactgagttggacgcattcattgaagggttgagttgggggtgcattggagggcgtaggaccactgcaaagggcagtgcattgcataaactgtggatcagtggtctctgaccagggctgggcactgctggacatcctggccccagcgccatcttcttgggctgatccccgcatttgcagcccctctcctgaatgtgtctctgagctgctgcttcttcccttctgttctcagaaacccagagatggatggcataggagccccttccgctgcatagggtaggagagagcctgctatggggaagcagtttggaagcagttactttctaaaactcagaactgagttttcattcctgccccacaatttactagtcgcatggctttggccaagggcaatgcttggaaccacagttttctcatttgccaaatgatggccatcatgcatcccccacagagctggtgtgtagacatgagagtgtatggaagagtcctggaaactacaaagtgcattgcagttttttttttttttttttttttttttttttttttttttggacagggtctctttgcccaggctggactgcggtggcactatcatggctcagtgcagcctcgaactcctgggctcaagcgatccttctgcctcagtctcccaagtacagggactgcaggtgcatagcatcacacctagctaatttttatttttatttttatttcattttatttttttggagatggagtctctgtcatccaggctggagtgcaatggcacgattttggctcactgcaacctctgcctcctgggttcaagtgattctctgcctcagcctcctgagtagctgggattacaggcacgtcccacaacaactggctaatttttttatttttagtagagacagggtttcaccatgttgtccaggctgatcttgaactcctgacctcaggtgatctgcctgccttggcctcccaaagtgctgagattacaggtgtgagccactgtgcctggccaaatttaaattttttttttttatagaaacggggtctcgctatgtggcccaggctggtcttgaactcctggcctcaagttatcctcctgcctataggcatgagctgccatgtccagcatacaaagtgcagttctcctctaacttgtcattcaccctgtggcggccagtcccagttgctctcttacagctccatgtggcatccctggaagggcttcctgtttatgtggaggctgtcagcatcccttgtggtcccttccctcaaagcatttgtgacacatgctgcactttccttaaactgtaacaggtgaatgcattttatagatataccaaattgaagccaggatagtaatggtaatgtatttctcagagaagcttaaaaagaacttcagaggttattataatacacacgaatctattccctcaccttctctgtggactcacagggagagcaaatattagctgaagaccctgagatcgaaagcatcaaatcagaaaggatgcttgaaaaatccaggcttgagatgtagagccaggctcacccctaaagagggaacagagcccacagcaggccctggtgcaggtgggatggatgcatcggggccaccagcctgcagtggcacatgacctggtgctcttacccactctccatgacgttcctccgagccgatgccagcatttagaatgagcgctcagcatcgcttcggccatggtggccgatggcagagattttgtgtaagaggagctgtgaggtgagagaaaacaagctggcacgcctgtcattcccaggcatttcccactttcctggggcctggccattctcttccctatataaccccttcaagtggacaagcctgtgtgtttcaggatgtccaccttttaggactgcaggtgtcaggaagaaaacagatgtgagggccaaggctgtgcagtccagcaaagggaagactcctgtgtggcaccggagaaactgggcttgaggaaatgaaaccttgttcagcagaggggcaggctgccttgttccgtggtagggtcccactgtagacgttattcagagacctggcagcctcttagctgcgatacctggaggcctgcactgggcaggaagccagaggcatgacccacaggactctttttcagcccttcagatgccacgcttggggcactcactgtgtgctttctggccactggcttctctccagaagttggctgtgttggtgggtgaaccttccttctggtggagatgtaagatgatctttctgaagaaggtggaggagccagctagggcccccatctctttaggtcaccagcagcgtatgaatcctacccttgaaatgagttcctagctgcccccgacctcgtgtgtggaccccctcttcagtgaagaaagggatgacgccagggtgtgtaaagacagaatcctggagtcgttccatgttgcgtgtcttggagaggaaggccagatggcctggagcattctagtggctgtgactctttgggaacggacctgcagttggcagcaaggagcatggacatggaatgaagtccaggcccagggctgaaccccctccccccgccccgcttcctttatccaaggaggagccactggccccacactccctctgcctcccttggtgttgattttcctggtgactttgaaaaacaaatccttttttgccttcacagttgtgtccctgtgtttgtgcggcgggggaggcggtgggaaggttgagcgggaaccgcccctgcctcggaacaggagtagaatccatgtattgtgttgggttttccctgtgactgacagctctttgcctggaggcttcttcgcttacagacttaatgtatctcctggcaggtttccttgttttggatgattactcgaagtcgggaataggcaagcccagggaggaacacagagtgtttctctctcttgggttcatcgtccccatccctgtccccccattcccgacgctctttggaagtggggtgatgccaggaatcgggtctgggccggctggcaactatgagcttctgctttacccacccaccccctccccccgcccagttccatagaatgaggaccctgggttggagtggaaacgttgcctgttcctcccatggagccctcagcctgagagttcctggggacccataccccaaaactccgcagagaacaccaaagggtggccacttctgaggcggctgggagggatcattggcacccccgaccctagcctgagcctggccatcccatccggtggagcctccatcccgctcgagctaactgagcacgcctgtctgtcctaggtccctgcctcaccccagaatgctcttcagaggaggcatggcaggggcactccctggcactcacgggggctcagcatttcctgagttggaagggttggggggctgggccacagccctgctgttgtatctgactgtggtcctgggaaaagtgaggccaggtgggctggcctcagggtccctggctcccggctttcctgccttactgcagccgcatttctttttaggaaacgacttatctgatagtaagctggggctgcacttcttccgcctggagtggggcttagttctctggtttttggcattttattctggcagggaagtagggagtggcttgcttgcatttgtggaagaaatgagggaggctgattgagcccatggggctggaacccgaggggctggggcatcacccttccggaaatgagtgtgtgaagggaatagtgcgtggggaacgaggggcggaggacagcagtggctccaggaagtcgggagtcctggttctggtgccagctcagatgctgacggctgaggggctgggggcttcattttctctctgggccccagttttctgatcggtaaaatgagactttggttagatggcctcttaaatcccattgtgctttaacattctgtgcatctatatgtgaagttcgtgtttgttaaacactcatgtgccacgaagcacaatttttctttagaggaaatctcacccggaactccattgtggaaaaccaggcagcacaggccaccaggtcggaagcggaggggactgagtgtcgggctggcttggcctccacttactcttgcggtgcatctgtggggcgtagggaagagtgagtgtctgacctgagggaagaagggcagagtgaactcaatgagtcactgactctgtactttctccctggactggagcatcggccttggccttgcagcctgggggtacccatgatggcaggccatgttagcctgccagcctgcacttgcctgcgcttaccagcagctcccagaggctttgcctctgcctcacctaagaatgctcttcagaggaggcaggggagacccctccccctacgccaccttccctgggctctgtagagcgagcaggtgtgggccctgcaggctgggctctgtggagtgagcaggtgtggtccctgcaggtcacttcatttgctgctgccctgagctgctgtcctggctgttgtcagccatgctggaggtccgtgggtatttgcagcccagcatctcctgagtggcagctccattgccagactgagggtccctgctgacgctctcagccatcacagagccaccagagcactgtgcccagtgcatgagtggggtttgctgtgggaggggccctccagcaatgtgggaggggctcagacaatgtgggagggggccctccagcaatgtgggaggggccctccagcaatgttggccgggccctggtgtgtcccagcctctagtgaaagagctcttcagggtgtttacctggcactttcttcccacagtgtggccggtttccataatagccactgtgctgcacctggagctgccgttctccttctcctcttccatctgagtctgggctaatgaaccagactctttcttattattcttggattctccagcttcccatcttcactcagtgatgaggctcctgtcagccactctagatgtgcaggcctaggtttggatcctacttgctgacaatcttaaagtttgccatggcaaacaggtaatgctggtgggagctgtaggcaatcccccagagagtcccctggcccagctaggacaccttgtgtacagcagtaggttggatggaacagtcaggctgagcaaagtaacaagctctaatcaactctttgtgttagcccaactcatcaatagatacaagaaaattggaggagtttggccgggcgtggtggctcacacctgtaatcccagcactttgggaggccaaggtgggtgcatcacctgaggtcaggagttcgagaccagcctgaccaacatggcgaaaccccgtctctactaaaaatacaaaaataagatgggcatggtggtgggtgcctgtaatcccagctactctcgggaggctgaggcaggagaatcacttgaacctgggaggcagattgtgccactgcactccagcctgggtgacagagagaaactgtctcaaaaaaaaaaaaaaagaaagttggaggagtttaatttttttttttagtttctataaaaatagcgttgatctgaatgatttttacaagttcagccgctgactttggcctgatcttctgatcacttcattggattgtctttaagtaaatcttgagcatggctgaaacagcaatcgggggcctgcacgttttctgtctagatggtctcacgggggtttcctatctggccaccagctctgtctaatgcagagaatgtgacctattcgcaggacaaggcctaaagatcatcctactcccattgtatgggagacacacacactctgaaagggactcggaggaggagatagatgtgacgcctacctggtggtctaattctgacacttgtcagggaaaagtactttttattgtagcaaagggaaggagaaacaaggacatgactgacctgaaacttaataaagatattgaaatctacatctagaaagagaggaagaaacaggatggagactcatgttgtccaaggtcatgtaataaaagcaagaatctaaattcagcagtgttcttatctgtgagatacgttggaatcttcattcttttggagtggaatgaagaagaatgagatcgtagatagccacagagagcttcttgaaagaacatagggaaatgaatcaaaatttctaaagctggagttattttggcccgatcagtgcaaaaaaactttatttgcttgtctctggcttttcttgaaggcagggcagtactttaaaattgtacagaaagccaggaaaataaaataaatgaatggatgaataaaacctaaacatgtatataactctgtacatatatttgtgtatataatatttttgaatatgtagtttcaaaaaggcaatgtgttcacattgtataaaataaaaaatgtccaaataatacagaattaaaagtaagaggaacaggttgccatgttcaaaatgctttcccatgcttgagcttatttttattttatttaaaattttattttatttaaaattttattttatttatttatttttttctatttcagatttccaaacaagcattttttgtgtgtttttggaggcagggtctttctctgtcacccaggctggagtgcagtgacacaatcttagctcactgtagctttgacctcctgggctcaagtaattctcccacctcagccttctgagtagctgggactacaggcccacacgaccaagcccgactagttaaaaaaaatgtagagctggagtcttgctatgttgcccaggctggtctcaaactcctgggctcaagccatcccccaaccttggcctcccagagtgttgggattataggcctgagtcaccctgcatggccaaaacctaatttctaacattacaaaacacagagctacaaggtgcacacatctgaacaccttgggtgagaggccctttgccatgcaggcaaaccagggacagtgagaggcagatgtgggaggcaaccaaacagctacccaaaaggcccttagcaacccagtcctatagggtgacgagaggaatggaggggccaccttttgcgcccttggccctgagtgctctgaaggtctccagctgtctcgtgaattgtcctagcagctcatttcaggctcttcagacaaatgaggaccctttgaaacttgtttatttgttgaccatgaggcacgacatatgcattcgccagaggtgctctggacaaatcacgatcagggtaggcgagaacaccagagagtggtcagcaaggttgggaggggatcctagatcttgagactgtgcctttcccagttggccatgtatatgaaattcatcaccctgtagggtgtgggggtttcccctgcacacagcattgcagctcctcaggttactgatcttgcttagccagggtgtgtgcagtatatgagggatggcttcacagtgaaccctcagtcaatgacagattgaccctgtgacttgtttatattatgcccctgtgtacacatccattcacaagagataggagccacaagggtgcttggatagcacctgaggacagactagctgcctccgcatcctcaatgtgtctcaactctttggatggcagccatgggcttaacccttctgtgctctgaagggactttgcctctagctatgggtgagtgcaagctgacatttgtctttcattttcccctgtctgtggctgcaacatcaatccccccatgctgagggagtgaggggcactgcactcccactccactggcaaatccttgaagggcctgcatggcccccgaatgtgcccagctgtgtaacagggcaaagcttgctggtgaaggctggtgaggtggggctgtgatcagcacccctgatgcaaactggaggccttggggaggaggtgcaggagagaggactcccactccctccctgcacggagtggaaggccatgaacgaggtaggagcacttggcaggtggcaggagaggcaggaaaaggaaatagaggagagggagctgcatacattagaggtggtcatgcctgctaggagctcacgggcctgtcccacagggctcagccttggcccccaaacctggatgttgactatcttcagtaggaagagaagcacggtccctggagagtacttggaacattaaaagaatctgtctgttgtggagccacttggtagagatacttagaaagcacttgccttctgcatgctaggaacgcttctgggagttggggcaggcgctccagaatgtgggccgagcacccgttcctgcaaagctctgtctatgtgtgccctgagtctttgcccatccagcagccttctgtggtctcctctagggctggggctgtttgtccctctgcaggtgctaatttggccccatgggtcagcagctcctgcagccacagggaagctttttgtttgtttcttctcaagaaatggcttcctgaagaagtagaaagggcgtgcagagttggggtcgtatgggtttttattgccgcttgctcccttcagctctcagaacctctgccccgtgacttgtgtgtaggctccagatggcttgagagaaaggaaagacccagggagggtctgaggacctggaagccggagtcagggcattcagcttgaggccggtgccacctggctgccttgaatgcgtgccagcggagtagggcagggagtgcgaattccagaaaatagaggtaaggccagctttgacataggaccgggtgctgattcctcttagctttttagattcttggctttggccagacctgtctcaggtcaagacacttttcagctttgagaggccagcgttcctctgcatcctgtttggtgtacattgtcatctcactggatgattgtgtgcctcgggcagggctttgccgcaccatcccccgaccctgcaccccacaaaggaaaactgtatgagctccgtcagccctccccctgcactcccctggacttgggagggaagcccagcgctgcccatcttatgccggggaaggtgtgtggcttgggcccaggctcagactggacctcgtgcccgccaagggccggagtcagagcaggccaccagggcccctctgtcttcaagccttcctgctattgacataaagcctagaaagctgaaaaaaagaaagagactattcaggtgtagaaagttggataaataggtagggtcagaaatgggaataagcaagaaccttgaactgtgcttgttgacactatcaggtccagagagatgaggcctctatttttgctttggagagaatcatgtgatggcgaggatgaaggattttggacataggtttttttttttttttgctttcttagctttgtactttggaactgtctatgatggatcagagagatgcttccctctctaaatccctttatacctagaaagctcttggagggaaagggggccagtgagacccttctctgcccccaggcctgaaaagcagctatccccagtagaaagggaacccccaagacagaggcctcctgttctgcttatgtggttcgttttgcttctggtagtgtttatatgttgtgagccaggcttcttggatcaaagtcccgctctgccatggactagttgtgggacttgaacctttctgggacagaaaggttctgctcccagacatctagaaactgggtgtcattattggagtatctgccttctaggctgttagaggtgtcccggagtgcatctactgataggtgggtagaccagaccccggcctgggcaagcactcggtgaccactggctcttgctgttgttgttagtgctgaagcggagttctgtgcagagagttccagtctggcgagtgagtctttgaacatccgggcagtggctgagctctttccatctctctgttcatttgtgtgccccacgtgtgtttagctgagccccctgatgtcaggcattgcactagtcattgaacagagattggatgcgttttgggccatgtcctacatgagctcacagaggggaggaggagaggtaggaacactcgtgggtcattctcatgcagagctctgctgcatcaatgttgaggcaaggagagccaggaaggccaaggctagactgggctggggaggcatcaaggagaagatggtctgtagctcggcctgaagcacaggtgacctgcacccccttccttcagagaggacaaaccgagaacatgataaagggagaagagtgaggtgcaactgctgcgattttgcagaggcattggactaactttgtcaggggtctctcagcaaaggggccagcagccccctaggcctctgctccccatctgtcacatgggatggcatgaagatctgctgattattatttgtggagtgtgtcaggtgtttttccggggctgtctttgagcttagacaactttgtgaccaagatggtgctcttgtgctactgtctgccctgcagggctggcctcgggcacatgcaagcaaggcccctgggggtggagcggcttgggcagcattgccatctgagaggtgggatgttcccattgtgcggtctgggcttctctactggatttcaaagacagggaaaggaaataggaagatgcagatgtagctcaccattgcaggcagggagactgaaatgaacggatccatctcaatgaatgaacacattcgttttgcaaatggctacgctgggatccagagaagtaaaatgattttacccaagtttatgctaaaggttaatggtggagtctaatccactaaaatgtgagtggtgggattggtcagctggggtctgctgactctccacttggggtccgttcctctgaaatgtgctgcctcttgctatccaagcttttgttttcttgattttgcaagcacccacagctctggaagagacctcagcaattctgtaagtagtgctgaccaccttgccctactccgctgtgtcttggacaggcctgtgccaattttgctggcttccacctgagctccagtgggtttggggggctgctctgggcctctaggatgtttagacgtcatccaagaaagagtccttaaaagataccactgtgaataaccaaggtgacaaatcaaacaacccaccctgtcccaaccctcaggctctttaaaccagtggttctcaagtgtgatccccaggccagcagcattaacatcacttggggacttgttagaaatgcacatttctggccaggcacagtggctcatgcttgtaattctggcactttgagaggccagggtgggaggatctcttgaggccagaagtttgagaccagccttggaaacatagtgagacaccatctgtacaaaactaaagaacatttttttaattaggtggtgtggtggctcatgcttatagtcccagttactcaggaagatcctttgagccctggagttcaaggctgcagtgagctgtgattgcaccactgtactctgacctgggtgacagagtgagacctggtctctaaaaataaaaaccaatgcagattcctgggccccatctcatggctgctgactcagaagctccaggggtggagcccagcagtctgcatttttaacaatcctccaggtgattctgatgatgctcactctagcatctctcagagcgagggatagtttttgccttttctgtagcccactccccatcttttccctcccaggagaccatcccacatttcaacttgccatttgggcaaacaccaggaagtagattggagaggaatgaaaaaccagtgaccccatggtaggaaaagctgtttgccttggcaggtttgcctggactcagagccaagattcaatcaatcctagtgatggactttatttaagtgattctcctattcttctttctctccctccagtgcaggatggtggtgagggtggggggctgggggtggaagaggctaagctgcacactgggaaggggaggggccacagttcttctctgatccactctgaggcccaagcccttgctccccaagatgcgtggcttcccagatgaaatcacaccaggcagcactttgctctcagagtggggttttcattttgcaccattagcttaactcagtggggatttaacacaatccaggaaatcaagcagttagcagcaggattctggatggctgacaccgatgctgctggtgtgtatgcattgatgatgctggcgagtgtgtgtgcatgtgtacatgagcttgcgtgtgtgcgttcatatgtgagtactggggagagggctctgcaaagttgcaatctctactctcctgcctggccaccttcctgaggtgtctggggtccagaaaacaggacaacttcaattaaataatttgtcccaaatgagccactcaggagcattttccacatctgctgttttttgttttgttttgtttgttttgctttgttttgtttttggagatgagagaaaaagaaatctgctttggatcttgttcttttagtttagttttttttgttcttgtgtgtaacgtatgtcttgtagtcagcaaatgcatccaagtatgcagcatgtggcttgtggtcaggggagagacgctgagttattgtgacaaagcacaagcccctttctctgctaaacgaattaatgatgccagacattggctcctgctgggaacagtggggtctgttaagctgccattgcaaggccattgtcagtaggacttatctgggccctagtgccgcaaagccagctcgccatggtgcccagaactctgctgagtgttggaaggaggttgtggttgcttgcagccaaatgccgtacccagtgctgttactgaatctcatttgcacaattggacttggggagggtgctttctgcctcagacctcagggttacccaagacatgtgtgatctggggctgggaggcaggaaaccagtgctctgtcttcatggcttagtgaggctttggtatctgagcagacttttccacctggaggctctgtggggtaggaggggtggagcaggcccatgcgactggtgcattggggtgcccgtctgtgggcctttcctgatcaaccaagctgggctaagccactttgtagagtttacagactggtgtggtggctcacatctttgagagcactttgagaggctgaggtgggaggatcacttgagctcaggagttcgagaccaacctgggaaagatgccaagaccctgtttctacacaaaaattaaaaaatcagccaaatgtgatgctgaatgcttgtagtcacagctcctcaggaggctgacactgaaggatcacttgcgcccagaagatcaaggctgcagtgagctgtgatggcgccactgcactccagcctgggcgacaaagtgagaccctgtctcttaaagagtttgccagtctcggatcacgaggtcaggaaatctagaccatcctagctaacgtggtgaaaccccgtctctactaaaaatacaaaaaattagccgggcgtggcggtgtgtgcctgtagtcccagctactcgggaggctgaggcaggagaattgcttgaacccaggaggcagaggttgcagtgagccgagattccgccactgcactccagcctgggcaaaagagcaaaactctgtctaaaaaaaaaaaacaaaaagagtttgccagtctcactgtgactagcttgccctctacttctcttgttatctctttgggaactttaggcccctctgaaaaagaaagcaatttagggaaaaagcaagtctcttaggaatcagagtgtgtggtctggtatctgtctctgggtgatttttttttttttttttttaacagcaccttttggaaaaaatggatccaactgcttgccccgtcatcccagatggctaggcccccattcatcccctctcgctctcctactggaggaactgctgtatgaatcataaagctctgggtagggaagcagggagcaggttccaggcagagctgacaagtgacttcacttttgagcatcggttgaaccagatttaacgtctcttccagttctaagtaaataatttgcattctaacccaattgattttgttatctgaaaaatgatggggattgactaaatcagtggactgcctccctcctcctcctcaaaaaagaaaaaaaaaggaaacaacaaaaagctggttgagaaagcagaattcttaatcaaaacccttaagaagtcctaactatatggccaagttgctccagctgaatggagggtgaagggtctggagatgtgaaatctctgtatttccttcatgatctgacattttgtggttcatttatattttatatacactgacattctttattagactaagttttttaaattttaaatttttgattcaacgtaaatatagtttaaaaagttaaattggaatgaatggtttttaacaaaaactgcatgcagttcccttcccacctctagttcctatgacctagaagtaataattttcaagtattttagtgatttcttcatattcagcaaactggagcaaataaataacatggttataattggatttcttatttttaatatttagatgttctttattgattttctgttattgaagttaaagatttatctctcttgcactgtctttccagtacaggtatatcacatttttggttaatattcagtgtttaatttattataattatgtaaatattatttgcagctgagccatgtagtgtactgcatatttatttcctttcttttacatcattttgtttttcctggagatagtaactgccccattttattaacccagttacttatgttcatattatgaattcagccccaagctttctggcagatatgcatcaggaaatctgcctgagttctctttcctaccattggtctgggctgatggagctttaggcttttttgttagacagggttcttcagagaaacagaaacaacaggagatgggagagggagttaattaggggcattggttcacaggattggagaagtctcacgataggctgtctgcaagctggagaaccagagaagccttggaacaatgcagcccccagtctgaggctgaaagcctgaaagcccccaggaggccactggtgcaagccccaaagtcccagagccgaaaaacatggagtctgatgtgcaagggcaggagaagagaaacagccattattgggaagggagggagagcagaaactccacaagctgaatacctgccttcttctccttgctttattctgactgccctcgcagctgattgggtggtgccagcccacattgaggtctgactcttcctctcccagcccactgactcacatgtcagtctcctctgaaacaccctcttggacacacacacgtttccagccttctcagcatccctcaatccaagctgacacctaaaattaaccatcacagcctgccacacagttgttcgggaaaaaccatcctaagccttccttttcctttcttaggttagacctttggtttcctgaatcccgtgtcttgtttaattctgcatttttttaaataggtaagtgagatgatgtacatgctaattagcttgatttaatcattccttctcttatacaaaacatcacattgtaacccataagtttatacaattattacttttcaatcaaaaataacattaataatgccttttttttttgagacagaggcccaggctggagtgcagtggcatgatctcggctcactgcagcctctgcctcccgagttcaagcaattctcctgcctcagccctcctgagtagatcggcccacaggtgcgcatcactatgcctggctaagtgtttgtatttttagtagagacagagttttgccatgttgcctaggctggtctcgaactcctgagcccaggcaatctgcctacctctgcctcccaaagtgctaggattacaggtgtgagccactgtgcctggctgataatacattttataaattaaaaaaattctgcatttttgtagagcacatcattgagtagtttcctaagaaaagatacatgggagatgatgttttaaaacctgttaatgcctgaagatgttttcattctactcttgcatgctgattgatagcttgcctcagtatcaaatttggcaattttaaaggcattgattcattatcctccagtttccagtgtctgtattgataaatccagtgcaactgggatactgatcctttgtattagatgtctacccttttctcttgaagattttaaaagttctttttgtctttcatatttgtaaatgtcatgattctttgagctgggtgttgtttaacctgaggactcatgttcttcatttctggaaagttttcttgtattatttctttggtattttctgccgtttgttttcttgttctctcttgctataatacccttttctcagatgttgaaactcttggattgattctctttttctttcctctgtttcccatctgtttgtcattttgttcatcttttcatgaaatttcttcaaccttatcttttaaaaaaaatttaaaaaatattcttgaaaaaattttttgagacagtctggctctgtcacctaggctggagtgcagtggtgtaatctcagctcactgcaacctctgcctcctgagttcaagcaattctcctacctcaccctcccaattagcaggaattataggcacatgccaccacacaggctaatttttgtattttcagtagagacggggtttcgccacgttggccaggctggtcgggtcttggactcttggccccaagtgatccacctgccttggcctcccaaagtgctgggattacaggcgtgagccaccgtgcctggcctctttaaccttatcttaaaaccattatttattgattttctgttattgaagttaaagatttatctcttttacactatctttccaatataattacatcacacttttggttaatattgaatgtttaatttattagaattatgtaaatattatttgcagctgagccatgtagtgtactgcatatttatttcctttctttcacatctttttacttgtcttgcattttatatttcttctcttatattttaaatttccaagtaatctttcccagtctctgaacattccttttaatagctttctgttcttgttttaggaatacaaaagtcttatctaatttattatcatttaaaacaattttttttgaggcagggtctcactctgtcacccaggctggagcgcaggggtgcagtcatagctcactgcagcctcaatctccccagactcagctgatcttctcatctcagcttcctgagtagctgggactacaggcatgcaccaccatgcctggctaattttttttttttggtagagatggggtctcactatattgcccaggctggtctctaactcttgggttcaagtgatctgcttgcctcagcctcccaaagtgctgagattacaggtgcgggccaccactcctggccatattatcattttttaaagttttttttttaaaattttattttatgtacagagagctagcatggtttctttcacttggtggatgccttggataatccattcagggaagctcacttagtctaacctaatgaagcctacctcctctgcatactgatggaaacactggcagcacatattgaggccataatgacaagaatgagaaccctggccgaatttttttggatggctccaggagagctgctggtgacccatcttgcttttaggagtgcaacaaggcaaaaagtgaaaagtttttttttttaatactccctgcattgtctctgttatctctgaattccttttcttccttttctgttttgtatgttacagtctctgccattcacatttggaggctttccttaaatacttgccagcccttgactgtccatttgaatttaacagcgagacatgacgttggaagctctttgtgtacatgcagggcctgtgatttgttaggcctcacttgagaattttgcagagggcccatatgtcttttcttttgaactattcttaggttgatgcagaagtaactacggtttttgcagttgaaagtaatggcaaagaccgtgactacttttgcaacagcctaatagtttctttagagaaaaaccactcaatcctctgacacaggcatataaatgtagtgttctaagacccgagtgtctcattcttcactttgcagactttcatgtaaccctttggtgttcacgcagcagcacctgtccggtcctcctctgtgtctagtataccccagcggcaggctgtgtgcaggttcaggccttctttttttcccccttttcttttctttttctttttttttttttgagatggagtcttgctctgtcacccaggctggagtgcagtgtgcgctctcggctcactgcaatctccacctcccgggttcaagcgattctcctacctccagcctcccaagtagctggaactacaggccttctgtatggaatgaagcccatggctactgctggagttggtgagggcagccacctggactcatggcccaggggagtaggtttgagtgtccatatgtaaacttgctgccaatcccaacattgacagcctctgtgatggagttcaggagtgtccgggggccccaatcaggagcatttgtgggacctggagtgcaaatgggcttgttttttactggcatccctgtctgtccctctttttcttcttttctctgcactttactggcatccctatctgcattttagcttttcttctcccttttaagccagattctaccatccatttgctttctgtcatacaaaatgttgatatgttcttttttcctttaccactttcttgcatgtgtttataacttgtttttttgactctaattttaaactgacttcaagaagagtgggaatgattgcacgggctcagtctaatccatgtggctagcgtgcctgcaagtgctccttcgcactcagtccagaagcttggtgatatggcttctctcttcttttcccttcccattggatttttgctctctggaatttgccctcaccactccagatcctggcctcctatgggttggcgtggccccctaatcacccagtgaagtgctctagtttcagactcattcttaagctcttcggcacttagggttgaggggtgtttcctccatttaaatggaccctgtggtcttcattgacactgggctgcctggtttcccagcggggcctcccgtggcatttacagtaactcttcttcctttcacctgacgaaggcgctctctagtatgtccctctttccctctgtactttacccttcattgctactatcatctgccatcagaggagttataagattgattcctaatgcaaccccatgccacctttccccacagacccttcctggattcctacagccattccacaggactggttatgaaatgactggctctgggccaatggttgccttacgttcaaagtcatgggtaggatgtctcgggcttgggagggttggaggcaccactcatagaagcagggagtcaggaggaagagacggctttgaagaatgtgagggtttgggatggtgtgtgatgacttcctcattctcatttcagcttcccaaataaggccaggcttcttgagggaggctaccaaggaagtataatttgtgagcaaaaatggtttgggtgactgcaagtagaatgaaagcttaatggcctactcaaatataatggattattttaagatttcccgagaaagacccaggcaggcccttgttgcagcctcaaattttgagttttcaaagtttctgggtctctgaattcttgctggcagctatgcctaggtgggagtcatgtcctacccttggaggatgttaaaattgttgcttaagaaaaaaaacacataatttttaaaatttttttgtttggttttagattagggtctagctgttacagggagctgagatccagggtccaaggtggtagtttagttttagccctatgctccaggcacagcagggtgcccaatcagggaagcatggagtgagcacagggtggggatagtgctggagataaactttgctgtctcccagaagtacccagcaggggctcctcagatggtcgatccaccaggcctgcagtcggatggtgccctgcactttacagacagagtactgagactcagagaagaacccaggacctgggactgtatccagctgttgccccagctgctaccttctgggcttctgtttgttcaccaccaccatttgcattgcaaattcaggccatgggcaacatcgctggggcccaggccctgtgagcatgatgggatggggtggtggtgatcagttccgggctgctcttgggccagcacctgccctcgccccagcagccccgggatgcatcatggtggggtctgcacacacacccacaaggaaaaatccacccgggacagctcatgatcttttcaacattgttggtagtctgcactcctaaaacaaacccttgaaagatggaaagatgttagtaatttctggccatacgtgccttctttcctgctctccccacctcaaaaaaagaaaggggccaagtggcaagacaagaagtaaagtctaatgtgtaacacattcccatactctgatttctcctccctggctgctcccccacctacgtaaactacattcctttacacggtcatggcaaaggaacattaatttttgatttgaattgtgattgaaagcaacacaatcagaagagtgaaatagtttccaatgaagcaatatcacttctaaccgggtcgtggtgtgtatggcaggaaagagtggttttggggttaggtgtgggttctgatcctgattctgtctcttacaaactgtggcctcatgctgttgttacttaacctgagtccttctccttgattataataaagtactattgatgccttcttaacatggttgctgcgagtattaaacaaggagtcgtagatagacatatcccattctcatctgcagagcccagcatgtggtgggtactaccttacaatggctcacttctctgcagacaagagggcgctcgccttgtcagctggagtatgcattagtttctcccatctctaataaataaaataaattaaaatattaaataataaagctttcacaaatgcagtttctcctttgccagagaagtctctttcaaccaggaggcactcttttgccatttcataagtgaagtcattttgaaatgtaggtgaaactgggaagagggtctgagctcctccctgtgatcttcttggtccatttaatcagtactccaagtttggggtccattctaaagaattttggaaccatagagtcagcatggacaacatgcagattaaaagtgcacatttagacatgggtttcaacttaggattagtgactttaggcaagccaacttaaccccctatgcctcagttttctcatctattagatgggaaaataattatgccttcctcctggagttgttagaattaactgaggaaatgcacggaaaatacttagcacatgttctggcaggtcacatgctttcataattgttagccactgtgatttagttcaggttaaagactttcctcagggtgtgtgggtggaagccttgcatcattaaaaagagggggcttggtaattttctattaaaaagagttcagaagatacgcaaattatctggtgactggcacctagaaagtgatttccaactcctttgggaatatctcgggctgaccagtcttaaaggggagttgattgtacccgcgacactgtgtgttcagtctgcttcgtttatagagcatgtccacgctcatttatcttcatcagcagcccctgtggagtcattgctacaggatgtggctcacaggttaacactgttaattcagtgtccattgggacagagaaaagagaaagcagagttggtgaatgggctgattttcccacactcctgggagttgagaacagaagcagccctggtaccatattggatttgaagagagctcatcacctggatttatcaattaggacttcaccagaacttgctctaatctgccagaaagtcaaagtagatttggattttgtgtaggtcttctcagttggcagaacattagtgctgcctgtcagtggggattagtggttgattagcgattgactgatactagcagtacctgctgtcttaccgccatagagacccagtagtagaaactgatttctcccatgctgtggttggacgttgatgtttaatgcaggaagcatgaccatttgaaacaacctttaactttcccttgctgagtgcacacacatagttctgcctgtcattttataggactcaattttcaaggaattgtaggtctttcaatgttaaaatactaaaccaataacttgctcttcaaaacaaaaccaaacaaaaagaaaccctcatggtcaggcgtggtgactcatgcctgtaatcccaacactttgggaggctgaggagggaggatttcttgagtccaggagttctgggcaacatagtaagatccgtctcttaaaaaaaaaaaaaaatcagccaggcatgatggtgcatgcctgcaatcccaggtacttgggaggctgaggtgggagaattgcttgagcccgggagtttgaggctgcagtgagccgagatcgagacactgcactccagcctgggcaatagagtgagaccctgcctccacaaagacaacaataaaaaacaaaaacactcaggattttttgtctttgaatgatgagatcaatagcatcagatcatgtggagtaaattgggttataggacccttttttctcttaaagcagtgcatgataactggatttttaaaaagagcaatgtgatttagctttgaaatttatttgaggatctcctggcaccgatggccattacagagagataccactggacaccacagaatagggggcggaggcggtggcagaatgggtaactgagaccttgattttttttttttgagatggagtcttgctctgtcgctcaggctggagtgcagtggtgtgatcttggctcactgcaacctccgcctcccaggttcaagcaattctcctgcctcagcctccttagtagctgggattatgggcgcctgccaccatgtgtggctaatttttgtatttttagtagagatggggtttcaccatgctggccaggctggtctcgaactcctgacctcagaggatctacccactttggcctcccaaagtgctgggattaacagaccttggtttttatggataaaactgcctgtttcttgacttgttacttgcctttcattttcttctccacctcagctgtacacttgggttattgttctagatgaaaagctttgttccacagtaaacactggagattccaaaagacatgagggaggatggccgacactgtaattgctgcttgggcgatggggttattagaagcccaaacctcagcatcatgcagtatacccatgaaaccaactctgcacctgtgcccctgaatctaaaattaaaaacatatatatttacaagaagaaagtataagccaaaaaataaaataataaaatgcaatcactttgaggatcaaaaaaagaaaagctgtgttctaaatgctttctcttaccctcttttctcttcttctgtcctctccatctctagcactgaggatgaaaataaaagaagtgaaaaaagaaaatggcgacaagaagattgtccccaagaagaagaagcccctgaagttggggcccatcaagaagaaggacctgaagaagcttgtgctgtacctgaagaatggggctgactgtccctgccaccagctggacaacctcagccaccacttcctcatcatgggccgcaaggtgaagagccagtacttgctgacggccatccacaagtgggacaagaaaaacaaggagttcaaaaacttcatgaagaaaatgaaaaaccatgagtgccccacctttcagtccgtgtttaagtgattctcccgggggcagggtggggagggagcctcgggtggggtgggagcgggggggacagtgccccgggaacccggtgggtcacacacacgcactgcgcctgtcagtagtggacattgtaatccagtcggcttgttcttgcagcattcccgctcccttccctccatagccacgctccaaaccccagggtagccatggccgggtaaagcaagggccatttagattaggaaggtttttaagatccgcaatgtggagcagcagccactgcacaggaggaggtgacaaaccatttccaacagcaacacagccactaaaacacaaaaagggggattgggcggaaagtgagagccagcagcaaaaactacattttgcaacttgttggtgtggatctattggctgatctatgcctttcaactagaaaattctaatgattggcaagtcacgttgttttcaggtccagagtagtttctttctgtctgctttaaatggaaacagactcataccacacttacaattaaggtcaagcccagaaagtgataagtgcagggaggaaaagtgcaagtccattatgtaatagtgacagcaaagggaccaggggagaggcattgccttctctgcccacagtctttccgtgtgattgtctttgaatctgaatcagccagtctcagatgccccaaagtttcggttcctatgagcccggggcatgatctgatccccaagacatgtggaggggcagcctgtgcctgcctttgtgtcagaaaaaggaaaccacagtgagcctgagagagacggcgattttcgggctgagaaggcagtagttttcaaaacacatagttaaaaaagaaacaaatgaaaaaaattttagaacagtccagcaaattgctagtcagggtgaattgtgaaattgggtgaagagcttaggattctaatctcatgttttttccttttcacatttttaaaagaacaatgacaaacacccacttatttttcaaggttttaaaacagtctacattgagcatttgaaaggtgtgctagaacaaggtctcctgatccgtccgaggctgcttcccagaggagcagctctccccaggcatttgccaagggaggcggatttccctggtagtgtagctgtgtggctttccttcctgaagagtccgtggttgccctagaacctaacaccccctagcaaaactcacagagctttccgtttttttctttcctgtaaagaaacatttcctttgaacttgattgcctatggatcaaagaaattcagaacagcctgcctgtccccccgcactttttacatatatttgtttcatttctgcagatggaaagttgacatgggtggggtgtccccatccagcgagagagtttcaaaagcaaaacatctctgcagtttttcccaagtaccctgagatacttcccaaagcccttatgtttaatcagcgatgtatataagccagttcacttagacaactttacccttcttgtccaatgtacaggaagtagttctaaaaaaaatgcatattaatttcttcccccaaagccggattcttaattctctgcaacactttgaggacatttatgattgtccctctgggccaatgcttatacccagtgaggatgctgcagtgaggctgtaaagtggccccctgcggccctagcctgacccggaggaaaggatggtagattctgttaactcttgaagactccagtatgaaaatcagcatgcccgcctagttacctaccggagagttatcctgataaattaacctctcacagttagtgatcctgtccttttaacaccttttttgtggggttctctctgacctttcatcgtaaagtgctggggaccttaagtgatttgcctgtaattttggatgattaaaaaatgtgtatatatattagctaattagaaatattctacttctctgttgtcaaactgaaattcagagcaagttcctgagtgcgtggatctgggtcttagttctggttgattcactcaagagttcagtgctcatacgtatctgctcattttgacaaagtgcctcatgcaaccgggccctctctctgcggcagagtccttagtggaggggtttacctggaacattagtagttaccacagaatacggaagagcaggtgactgtgctgtgcagctctctaaatgggaattctcaggtaggaagcaacagcttcagaaagagctcaaaataaattggaaatgtgaatcgcagctgtgggttttaccaccgtctgtctcagagtcccaggaccttgagtgtcattagttactttattgaaggttttagacccatagcagctttgtctctgtcacatcagcaatttcagaaccaaaagggaggctctctgtaggcacagagctgcactatcacgagcctttgtttttctccacaaagtatctaacaaaaccaatgtgcagactgattggcctggtcattggtctccgagagaggaggtttgcctgtgatttcctaattatcgctagggccaaggtgggatttgtaaagctttacaataatcattctggatagagtcctgggaggtccttggcagaactcagttaaatctttgaagaatatttgtagttatcttagaagatagcatgggaggtgaggattccaaaaacattttatttttaaaatatcctgtgtaacacttggctcttggtacctgtgggttagcatcaagttctccccagggtagaattcaatcagagctccagtttgcatttggatgtgtaaattacagtaatcccatttcccaaacctaaaatctgtttttctcatcagactctgagtaactggttgctgtgtcataacttcatagatgcaggaggctcaggtgatctgtttgaggagagcaccctaggcagcctgcagggaataacatactggccgttctgacctgttgccagcagatacacaggacatggatgaaattcccgtttcctctagtttcttcctgtagtactcctcttttagatcctaagtctcttacaaaagctttgaatactgtgaaaatgttttacattccatttcatttgtgttgtttttttaactgcattttaccagatgttttgatgttatcgcttatgttaatagtaattcccgtacgtgttcattttattttcatgctttttcagccatgtatcaatattcacttgactaaaatcactcaattaatcaa

SEQ ID NO: 191 - DNA, 14355 bp, Homo sapiens
gacaaaagtctgaggctggtggagacttaatcaccttaatcagtgattacgacggtggggaatgcaactcacttccagacattctagaatctttggaatccacagtgctctgcaggaggaagcaggagcctcttgaaaaacttaccaccaaacttcatggaatcaccctggccttcttcaacaaaaacctctttaacagcactaaaacacagctaaaaggtaaccttttcatgtaggatggtttatttggtagtgtttggttgtgcaccagagaggatggaaggagttgtttcatagcctttcaaacaagaccagcattgtcaaacatttgctgtttcttctgctattcccctattcccttctgccctcaaaagatgtttaaaattttcagggccatgatgttgccccattttgctaccacgcttcttttttcttgatcttttgtttcaatgtctgctttctttcccctgtgtgctcactgaagcctgattgtggggtcaagctataattagtttatatatgaagtttaattcactgtggcttttttggcattagactcaaatgggctttgatgtctggctggggctttgatcccagaccctcgaatggtggtcatctctccagctcaaaggattgccctttactcttttcctcctattcggagacagcttttcccaattacatcatttgtgtttgtttggccataaaagctgcaaggcatcattttgttgctttgcttgatggcaaaatgtgcaactgatgccccttactttgcttggctgcaatagaatgttcaccgctggacaaggcatttgtagaatgatgctcagactttggtgggggtgctgttaggagctgttctgcctaaggacaaagcatcagactgtgtgatatgagggacatgttctggctctgcccaggaaagatcttcaagcataagttaacaccactgtaatatattcagccaagactctttttcatgctggcaactttatcttactctccagatcatccaggcagcaggtccaccccatcgttagtggtacactttctgagtgtcaattaacagtttttctgagcagacaggcgtgtccagggaaagcaaaagaaccaactagggctgaacaacattagaaaggagataatgaaatagcactagtggaggaagaagtaccagcacctgctttaaaaagaaagggaaagaaaaatcaaaacagtagggggaagtgagattccgttggcaacagaagggagcagtaggcgatcactttcaactgcttccggaatacctgcaacaaaaacaaagaatcaaagaggaaagaaaatccaggcaactagactggaggggagaaaatttggctgctagcttaaaaagagaataggggcaacccagcctgtctcacttaatctgatgacattgggagttttcctggaaaaacaattacagcattgagctccttgcttctaacttcatttgacagcctgagtttgttttaattggcatgtgaatgaacagcattatttattaatgtgtaatggatactttggaaagcataaccttttttcctattcgtgaccattttattggcggaaccatctgaatatattagttttaatatttaaacttgctgagaacactttttcatggagatatacaagctgttacggcaaatggcttgctttggactaatgagccagctcaaagtggcatttggtgaggaggggggttgggagggtggggaggtttggagacatagcgagcttgtctgcctgacttaagatttattagtagtgtgtaaaaatgtgtttcagctttttttccccctcaactatacaaatatagttgtcgatgtgtgacataacacaggccacaataatagactccacccagtcagaggaatctaattcagagctggaaagcaagaagcttgtttagaaatgagcagaatgaaacaatgacagaggacatgggtgagtggcatttggcaagcaggataagtcactatcctttcgtgccttactaaaattagggaggaaaattagttcctatattataaagtagtgtttggcaacagcaggcataaagaatagataacctgaagagaatcgattttgtatgcttatgaacacctgaccataattccatttttagagctaatatacaaccttgttaattatgaatcaagtttgtagttctttcatgtctgtgggaggcagcaatggggaggaaagtgaaaggtggcaagggagttcttttgtttttgttttttggtaaatgtcaacttaattctatttgtagtagagattaaatgggtactattaagtttaaaagtatgctaatgaaaaaacaatttacaaccaatctacattctcgagtctctctctagcaattgtcaggtgaatgcttgcaaggtaatgtgctgaatacagcgatactaagagggtattaaaacagtccctgccttcaggaagctttcataatgtagatggagagaagagatacacataaacacctacgtagatagatatgcgtgtgcacacccagataaataaccatacaggtagcatgggatcagaatcagatatttatatagttaactggagctcaaaggttggaagggtggttagaccacacagagaggggaggaaagaagaggaattcctagcacgggtaagcagatgggcaaaagtgcaagtgtctgaaataatgatataggatgcactctttcacacaacactttgcctgaacttcagcaattgtgacttgctggattgaatttccgaggttcttggatgtactgcttttaaagatatatgtggtacttttccacagataagccagctagtggaattttcagacccctatcccaccggaaatttcagtgggataggggtctggagtagtgtgttccaagcagagatgaccaatacatgatacttcaagagggaagacttataaatccctctggagaaaagctacaactcatatcacctttactatctatgtgctagccacgttgtaagtgcacagcccccacaatatatagcatatgctgcatactattataattcttcaacagcaggttcccatagcagctgctcccttttacagtggggggaacgtacacagagaagggagtaagttgcccgcacagctatttaggggtgaaactgggatacaaatccagacagtctgatttctgagtcagagctcttattgtaaacgcagactaagtaataataaaagctcaaacaaaaaccaaagcgcgcacgcgcgcgcactcaaatcgtaggcttgtaaaagaattgatgcaacctctcgctatacaacgacatcctcctgcctaattttaaatgccgtccatcgtaagaccgacgttaaaaaattaaaacgacaacaaaacttaagttttagaacactgcattgtgctctgtattgcttgcctttacaaagtggagttaaggaaccaaccccacagtgtctgtgaatacacttgcaataccttgcttgggaagtgaaagaaacctaactcggtgtgagtggaaatgaggagtggccgtgtggggaaagggttaagactgtgctgcaacttggtcgagtttcagaaagttctccggagagcccaactgccgcgtcccgtcgcggcccctgcctgcgcggccgactgtaacaggatgctggggctccaggcgctcgccccgagctttgggcgacgagaaagagccaatgaggagcgagggcaaaatcgggtgcagtaaacccgaaaagggggcgaggaggcccgcgaagagagcgggggaggaggcggggaggggcgaggaggggcggggagggccgagcgaggaggaggcggctctgggggccgggcggcgcgcctgacagaggaggggaagcctgggggcgcaagcgtcgcagccgaggggccggcgcggggaggcgggcgccaggcgggggtttgcagggccgccgcgcgtgacgtagcgccgggcagggcgttatcagctgccgggccgcggcgagggacgcgcggcgacagcggacggcgctgcccgggccgggacagcagcagccggcggtcgcgcgcaggactcgagggcttctagccaccgtccccgccagcgccgcgccccgccacagggcggcatgagcccacccgcggccgcagccctagcgccctgctcctccgcctgggcggcccggctgcggtgacggctctcgctgcccgactgggggccatgaagccgagtccggccgggacggcgaaggagctggagcctccggcgccggcccgaggcgagcagcgcacggcggagcccgaggggcgctggcgggagaagggcgaggcagacaccgagcggcagcgcacccgggagcggcaggaggccacgctggccgggctggcggagctggagtacctgcgccagcgccaagagctgctggtcaggggcgccctgcgcggcgccgggggtgcgggagccgctgcgccccgcgctggggagctactgggggaggcggcgcagcgcagtcgcctggaggagaagttcttggaggagaacatcttgctgctaagaaagcaattggtaggtcgtgcccgaaggtggagcacggctgttcctgcccaggggctggaggtcgggcaggtggcctggggcgggcgcgaggttgactctggctggggagatgctcgctgttatgggacgcccccgaccgccccatacctccctgatccccttcctgagtgcccgcggcgtgtgggctgccgacgcccacgcgtttctggcgtgtgcccgctttgtgtctggcgacctcgcgcggattgcgggaagggggtggccgctcttccctcctcctctgccttcgggattcttggagtcgcctagttctaacgttcggtctccttagttagatgagtatatgccctctccccagcggtttgcaaactcccacttaaaataccattttatttggaggttttcttgactttatctcctcccgccgagaggggccaaaagccaaggagggggtttgtggcgtgcttaactgtccagggccgagttttacgattacactggagcgcctgtagggagccgtgcctctccgagagctctccccagcatgccagctttcacccaggctggtgcttaatttcaaatagaagccctttgtataaggcagctcaaactagatggaaatgatggaaatttggctggagactgtgtcccctcctctcatattttatacgttctgccagctgtgattggtggtggaggtgggagaaaagagaacctgctctcggtaagcatttatcttactgggtttctgtcagtgtctcagtctttctatgcagtcttcattaatggggaagaaaaagaactttgtagcttaatgtattgatgaacagcttttgaccccgcctcagaataatggcgacagctttgttttcagtgaccttaaaatgtagttttggaaacagcaaacgtcctcacctgaccaagtgatactatctaaactagacacatgccaggtagtggccctcccacaataaagtggtgatgctgtgcagttgtcatgtgttttcttctattatctcttttcagatcatttcttttctctgtgtgtgtgtgtgtgtttttaagcaccaaagtgcttttacttgataggttcatttttcctgaagaaattaattgtagcaaacaaacatacaatttatgtctccaagctttttaagtcaaaagacaagaggcgtagatattcatatgcatgtgttttgtaaggatgtacactgtggtttgtgtaatatctctgttttggcattttactgtgctgcttcggtcacagaccagattcctatgtaacattcatttgagccagttctcactggttatggctggtgacttttacattttattgttttgtgcaattgcacctttttgtctgcatgaatctcaagattgtaagtggcgcattcctattgtccgcttgaggggagcaaagcagtatgtcaagagaattccagtccagtcagtatttatggtactattttcatttgtagacttggcattcatgatttgaaccagatgctttttgagttctcccgtttttccagcaataggaagcactaggtggcagtgtgagttagcacaatccatctgtcacctttggaaacccagaggcgttcaaatctcgatgggccttcccatgagggttttggattctgccagctcacattatacttggcactggctattagtattagtttctcactttcaaaggctctaagactgattaaaccccacaaagcaactaatagaaaacaaaactctgcaggccaagacatttggccagaaaatctcacctaagattatagtgtattataggaaatctcttactctcatttcaaattaaagagtctactgtgaagtattgttttttaaaagactggttatacaccagatgatttaaagtctcagtccatttttcttgtccctatctatgaaaagtcagtttgtatatattagttgaaactaaaaacaagtcttgtttttatgaagaaactttatatcaccacaaaatgtgagaaagtggaattaaacataggacatattcttgaattctcgaagtttttcgttacttcaggtcatccagtaaaattttggttttctaagtttagtgaactcttcagatgggtaatttgaatccttagagtagactttctggttcttttgtcacccctgtatgttcatgtttcctttgtttcttcctaatcagaactgtttgaggcgaagagatgctggtttgttgaatcagttgcaagagcttgacaagcagataagtgacctgagactggatgtagaaaagacatctgaagagcacctggagacagacagtcggcctagctcaggtgagtgattgagcacaaggacagaattctgcactcttgagttgtatctcagccccttgtggttaacattcccagacctgcaaatggcaatggagtttgtttccagtgcagagaggataaacaaaaaagaagtctgccattcagttttatcggaataagagggaaataaactcagacaacaaaatttttagtaatgagatcaatgtgattggagtcccccaagtttaaaaataaaagctattcaaatttctgcaagaggtgccctcctttgaaacttgagtaagtcagaactgggctagaaaattagtcacacttcaacttcctgagaccacttcaaaagttttttttttttttcttttaaaccatttgggctccttagatttttctcttattattgttctgaaacaatcatgataaagatgaggcttgacagatctaagtttctttccttggacatgttcaaaggcggggtcaaggaataaggtcaatttgagggtgagggtaactctgaaatgtacccctagttatgggctctttgccttttcctaaggattgtttgaaataagaccataagattaggacaccaaagtccaatgaatcaaaattggccaaaaaacaaacaaaaaatctccttttcctaaatgattattcattttcctgttaagcgtgaatatgcattatttcttgacatgatgttaattccaacggtgtttttatttgtagggttttatgagctgagtgatggggcttcaggatccctttccaattcctctaactcggtgttcagtgagtgtttatccagttgtcattccagcacctgcttttgcagccccttggaggcgaccttgagtctctcagatggttgccccaaatctgcaggtaagaatttttagcactgatagaaatttttaattggaaggcatcaagggcccttaaaaggttatttggctccagcacctttcactggtggaaaaatgaaggttcatcactttgcggcatttagtgccatacttacatctagaactcagtttcatctaggtgagtatctagaactattccagtaccctttgggtgctacttggttatatattttgatagcagcaagacactttatctctagaaatcctgtcccaatattgtaggtcttgagctctgtttctgagcctttgctgttaggttgtctgtattttctttcattttggaactgttttcttcttttaattatgtaaagctaaaactcagccaggtgcagtggctcacacctgtaatcccagcactttgggaggcttaggcagctggatcacctgaggtcaggagttcaagaccagcctgggttggcccggtgcagtggctcatgactataatcctagcactttgggaggccaaggtgggtggatcacttgaggtcaggagttcaagaccagcctggccaacatggtgaaaccccatctctactaaaaatacaaaaattagccgggcatggtggcacatgcctatagtcccagctactcgggaggctgagggagaattgcttgaacccaggaggtagaggtcatagtgagccgagattggaccactgtactccagcctgggcggcagagagaaaaaaaaaacaaaaaacaaaagaccagcctgggcaacatgatgaaaccctgtctctactaaaaacacaaaaatcggccgggtgtggcagcatgtgcctgtaatcccagctacttgagaggctgaggcaatagaatcacttgaaccccagaggcggaggttgcagtgagccgagattgtgccactgcactccagcctgggcaacagagtgaggctccatctcaatcaatcaatcagtctaacactcacattaagttaaatatgtccatcagcctggccaagaactggttggcacttcagggagcaatggccctttcatgttctccagaatgttctgcatgatggcagcttgttttttcttttaagtgggtgcccacatgccattattccttattttgggatatctttgcaatgacccccagaaggaatcatgctattgtactagaagagtttctgcatttccagtatgtgtcacacactactggatgctctgtatgtatttatctccaatgaatcctcccaatagtcgtgcacagtacaggtcttgttagctccattttatgtattaaaaaaatgagtcctagtaaggttacatatgttatttaaggctctatagatggtgagtggcagaggcagaagttaagctcaggcctaactgccaggtccacgtttttcatcatcccaagggaattcagaaattgttgttttcaaccttctcatctaacagaagaggaattttggcttataagctaattgtcagaggttctccatctgctgaatggcagggttgctgctggaactcaagactccttccttagtcctgttacattgtgaattcttataagagtagagaaaatatgaagattagaattgctctgggtcctgggcacaagtcatcacactcctggtttgtctgtgttctccacttgggtataagcctgaatttttgagtccaggcaaggcaaacaacactgagcagctgagggagctaattggctggtgtcttcatatctgtgtgttgtcagcagcaatcatttgaggaagcacagaactgtgttatctagagggtctgggcctcaagttcattggtaattgctccccttcattccacagatctggtttcagagggaaactttataaacccattaaaggcactttggtttaggttttccttcaagacagacccgtgctcttccaaatgccacttcctcacataattgagacagttgcaccaggccttgggggctaggatatctgttttgttcaactctaaagagggaaaagggatgaatagtgaagtgtttgtcagtgtggctttaagtaaggcaaagatagggcttacgttgctgggagaggaaggatggggaaggatgttagctagagaggtttccttttagaacaagctctttattggggggggtcatgtgggtggggacatggcacttttgttttattatgttttctttacatatcatctctgggtctagactattttttccctgagaccgctaattatcattgaagtttatggagctttctcaacatagaatcaggcacatataggttctcagtatttgaatgaataaatacaatggaggacaaattattactgataaactcaactttaattttctctgataactgaaggtcattaaatggatttgttatttataatattcaccaacttaagagatcaaaatcctttaagacagcaagcttgattttgctgtactttggcatctacattttcaagatatgggaaatttatccattaatattaccacatgatcttttaaaatattaccaagaattctttatcctattaaaaaaacatttttgacaagtgggaaatttatccattaatactaccactcaatcttttaaaatcttatcaagaattctttatcatattaaaaaagtttttttaaattaaaaattttgttgtagagagatggagtctcactgttgcccaggctggtctcgaactcctgggcctaagcgatcctctggcctcagccttttggtgttaggattgcaggcgtgagccatcatacctggcccctgttttatttttttagcatcactattgaaaacataaggcgattattatttaaatctgatcagtttttactgaagtttgatcagtttccatcacctttcaattgacagttatatttgaatggatgtcattaagaattaggtttaaaaaaacacaaaatgaggagaaagcctactgaacgtacagtttatcctaaagaaagccaggaatagaacagaggggagagcagcctagagaaacagtgattcaaaaaatgtttcccagttgtaaacgcagtacagacagtttaacagaaaataaagaagaaagtaaatatcacttacttctgatcattctgaaatactactactagaatcttggtgtgcttcatctcagatgttttttctttgcatacatgtgatcctaataagattataatcatattctagtattatatcatgattttcactaaactttaaagtgttttccctctattatgcagtagtttgaaaacactcttaatggctgaatttttttccttcagaggatatatcatatgctgtcaaaaatttttgttaaatatttccccctcatccagtagcagtacctacatgtgaaatggtagggcagcactttttaatccttggcaatctctttttacccatggatttttcataaaaattggccaaagagtcaagctggtgctgaccaattcatttcttcagagtgtacctttaactgtttttcagatctcataggattgttggaatataaagaaggccactgtgaagaccaggcctcaggggcagtttgccgttccctctccacaccacaatttaattcccttgatgtcattgcagatgtgaatcccaagtaccagtgtgatctggtgtctaaaaacgggaatgatgtatatcgctatcccagtccacttcatgctgtggctgtgcagagcccaatgtttctcctttgtctgacgggcaaccctctgagggaagaggacaggcttggaaaccatgccagtgacatttgcggtggatctgagctagatgccgtcaaaacagacagttccttaccgtccccaagcagtctgtggtctgcttcccatccttcatccagcaagaaaatggatggctacattctgagcctggtccagaaaaaaacacaccctgtaaggaccaacaaaccaagaaccagcgtgaacgctgaccccacgaaagggcttctgaggaacgggagcgtttgtgtcagagccccgggcggtgtctcacagggcaacagtgtgaaccttaagaattcgaaacaggcgtgtctgccctctggcgggataccttctctgaacaatgggacattctccccaccgaagcagtggtcgaaagaatcaaaggccgaacaagccgaaagcaagagggtgcccctgccagagggctgcccctcaggcgctgcctccgaccttcagagtaagcacctgccaaaaacggccaagccagcctcgcaagaacatgctcggtgttccgccattgggacaggggagtcccctaaggaaagcgctcagctctcaggggcctctccaaaagagagtcctagcagaggccctgccccgccgcaggagaacaaagttgtacagcccctgaaaaagatgtcacagaaaaacagcctgcagggcgtccccccggccactcctcccctgctgtctacagctttccccgtggaagagaggcctgccttggatttcaagagcgagggctcttcccaaagcctggaggaagcgcacctggtcaaggcccagtttatcccggggcagcagcccagtgtcaggctccaccggggccacaggaacatgggcgtcgtgaagaactccagcctgaagcaccgcggcccagccctccaggggctggagaacggcttgcccaccgtcagggagaaaacgcgggccgggagcaagaagtgtcgcttcccagatgacttggatacaaataagaaactcaagaaagcctcctccaaggggaggaagagtgggggcgggcccgaggctggtgttcccggcaggcccgcgggcgggggccacagggcggggagcagggcgcatggccacggacgggaggcggtggtggccaaacctaagcacaagcgaactgactaccggcggtggaagtcctcggccgagatttcctacgaagaggccctgaggagggcccggcgcggtcgccgggagaatgtggggctgtaccccgcgcctgtgcctctgccctacgccagcccctacgcctacgtggctagcgactccgagtactcggccgagtgcgagtccctgttccactccaccgtggtggacaccagtgaggacgagcagagcaattacaccaccaactgcttcggggacagcgagtcgagtgtgagcgagggcgagttcgtgggggagagcacaaccaccagcgactctgaagaaagcgggggcttaatttggtcccagtttgtccagactctgcccattcaaacggtaacggccccagaccttcacaaccaccccgcaaaaacctttgtcaaaattaaggcctcacataacctcaagaagaagatcctccgctttcggtctggctctttgaaactgatgacgacggtttgagtgacatcattggtgtagaaagtttgtgtgtttttttttcttctccctagttgccaaaattaaaaaggtggtgttttcatttttgtataatactttaatggaatgctttttaaaaaaatataaaaccaaggtaaattattgtttcatcttcacgtatggatgctagtgcctttaatggaaggtaaagaatgttttgctagttagaagtacatattgaggttttaatggtggtgatagtgagttttgtggcaccagctgttttttattttaaactttctgagcatccggcaaggtacaggttttgatgttcaagttttattgggataagatcttttgatcccaaggtcaggtggatggaatttttggatttatatttgttccttgagtcttcagggcagtgtctccatgagggttttcctgttgaggggcaccacatacaatagtgtgaagtaggtatgaggggcagtcattgtattctatagtttttttatgtagtctacatttctcagatgtatccccattcggttttattctcagaactgttactagactcatgacttggaggccaaaccttaaatccagagatagcagcctcgatagggaccttaaaaggattcacaaaaacttttgccacacttggtgcctaggccctgttcctaataaccccttctagggccgtttatccaacatttagatgccttcttttccctccctaatttgtagccagtccaacctttcattccttggaggatttagttttgggataaaattttggtccttgggcacagagacattcactattaatgaagtaacccttgggcatgactccaatcccagaattgctcactgagcgctatgccaccgaagcgttgacctgaacatattagtgcaatccagtccagattggacctttgatcctatgtggaagggctgttttttaagaaaaaatttttggtaaacagtattgtgtaaaattgctttttgtataccaatatatgcatgttttgtgcatgagtagtacttgtgttgatactcctgttgatgttaaattactatataatataaacagtatgtgtttttatatatcattgtgtaaatttaatataacatatgcagtaataaaccatttgttttactgctgttaagtttgttatttgggtataaaaccagatgtttacacctgtaaa

SEQ ID NO: 192 - DNA, 17153 bp, Homo sapiens
ttttcctcttcaagtttctctctcagaacaaatgcagtgttaatcccgaagccgcttgcgggacactggcttcttctcctcagtttcctccctaatatatttgttgaggggtaatacaaaatcactgggaaactgattagagcagatttgaagacaaaattgtggcctggtaacttagcaaaagcataatggtgtcatcttgtatgctgatgataacgttctgggcactttgttactttcgttttcttttttccctctgtgtgtctttgtgtgtgtttgtgtgtgtgctcacacccacacgtgtgactttgcacgcatttgtctttgagagagagataatagtttttgtttttctttcagtagccaaagtttaaaccattgctttttctttgattctatcgcttttaaggtgatctttcttaacacaggataagaaagcagtaatgtcctaaagaatgctgttgaattaattagtatcagcctctcctacagttctggaaggatacgtggttaagtaccactcctggatgaatcagaaaaacagccacttgagcaatttcgtgttctgtggttcagatgagaatcccagttgagaaagtaagaaaatatgtgtttattcttcagctttaaattgttatatcacaaacttccttcctccttggcaagctttcttttttgacgagaagaaaattgtaataaacaacagtatgactaatagatagtcacatggttacttccagtttgcaaaatgctatttatactttgagttactcttcaaaagtggtatacctctagtttggagctgtgctgtaaaaacaagagtaacatttttatattaaagttaaataaagttacaactttgaagagagtttctgcaagacatgacacaaagctgctagcagaaaatcaaaacgctgattaaaagaagcacggtaagaacatttttgtttgtttagaatgaccgttatttattgaaattgtgatgcagaatgttaaagccttcgagaaaagaattaaattttgtggtttcttttgtgaaactagaaaattccttcttataacaagattgagatttgcatatgactgttttgtcctaataaattcagacttactttacattatttgaattacaatggagaaggattaaccatgacttaaaactgctcaagatttagtttcatttttactaagtattttataaaacaaatacttgagaagatgatagatatgatccagatactcatacagttctcagaatgcatacataatatgataaatttagccaatagttctaatatttttaaagattgctttattggatggtgtaaagatactccgggctttaggagtacttaacggaaagaatatatccctttcctactcttactaaggaattgctagtactccgatatccatggagatgtctttaccaaccctaagaaggataaggaaagaaaatgttctaaaaaatacactatgaaacaacctggtaacattggatttattaaatagcaagttcggaatatataagatccaagctacatctttgagatttcaacagggtttatttatgtcaaaatatttgaaagagaaaaggctgaaactaaatgcattcaatacaacgatctatgatttagagatttagggactgtgatgagctttaagcatttcccgtttaactaaatgtcaacctaccagcgtatgctacggtcaaaaaaattattgctgtggtacaatagaatgcacactttatccttcctcccgtattttaaccggttttataattctgcctaaagttagataaaacaggtttgcggggaatgagatcaatatttgatggtagcataaaatatcattttaatcaaaagttttaagaaggccttccagccactagtaaaaccagtgttattttctactttcaatcaattgtataaatttatacatttgtatataaatacattatataatacaatattatatatcatattacatatgaatatattttaaaagttactgaataatatattcagtataatattgtatatattatagatacatatatatctgaaattatgaacatcgttttaatagcggtaatttagggcagtgtgatataattcagtcagtttttatatacattttaacaaatattttatttgctctgcttatcagtattttatgatttttttctatagctattagccaagaaaaataatattctgtttgattttaaatgcattggtcactctgcatctttcttatctttccttagagagcagaatcaaacagaaaacagttgagtcactgaaacttttctatggggaaaacaattgcagtccttaactgtttagattatacatttaaatatagaactattttagttacactgttaattaaatccattgttctcgaactgtctggggaagtgtccttttaagcatagcctcatcaaacgttaagaaggctcaacaactttgaaattcatgtttcgatatcagcttcatcgtgggagatcacaattttttaatttgtttgaaaggcagctatgctaaccacattctaccaatgccactaatttttctgataactcatgtaaataattacagcctcctaaataagtattgagaattcagtaacaatgaaaagattctgggaaattaaaaacaactgaaaacaacttatgctgagtgtaaaaagctagatttcagggttcacgatatagattaagtagagaatgaacacataataggtttaaatttgtacctacatattcagacatgcaataaatgttgaattcattagttatttaaataaaattaaatgttacttcaagtctccatcccactgaatggacaggacagtttacttactttctgtcatttggtggtattgagagtgagagatttcttccaaggttatatgaagtttcccaggttgtataagacaccaaagtgttataatggtctccattcatcagtttccactgattacacctgagaagaccatgttccaatataaatgacctcttcgggtctagctctgctattttgtgctgaactcataacaaaagccacactgtttctttgccacatttaaagtacgatcatcttttttgaagctggggtcatctgtacgtaaaatctaccaactctgtatacaccaccaagtccttatactctaataccttgccaactttgcaatggaaagggctcctattttccgctgtatctgcaaattgtcatttctcatattgtcaggatgtgcattgcccttctctctacctgttagctcgaagttatttcctctttttaaaatcccttcacaattttcagaaacattacttcaataagctagatttttttttaattgaaaaggccattgatttaagcagcttagggttttcttttcaacagtcattctggaagaaagaatatcaaaatggtctgactacctccttcaaataacagatatgaaattgactcaaaaaatacttccacttgctgcaaatgtaaataatctttacactcttaacacacacaaaataattaaaatatttaaaaacaggacaactataacacaagaaaaaaataatagcaaaagttaccttttatttacttcctgttgtaactatactttctaaaaacacaacacacatatgctctttaaaaaaaaatagaagtggtactagttaatggatgaagagtataggatcaaatgggggtaagaaaatacaattacatgccacaaaggtttgatcaagattttgaaatcatgatatctctaacatctatatttttacattatgccaattcatggggagaaaaacggaatgacatactgacatatttacttgattcatggcattgaaaacagagaaaaaacttcctgtcttttcgatacctgaggtttaaagaaaattaataaataattcatgatattaataaggttatatatgaaagataagaaacctcatcagaaagagcttgattttttaacacttcttttttctactaatttggggtttggtttgttcttgctcttacaaatcctttaagttcatcattaggttatttatctgaagtctttttacctttttttaaaggcatttattactataaacttccttctttgtactgcttttctgcattccacagattttagtttattgtgcttccattttcatttgtttcaagaaatttttaaaattttcttaatttcaacattgactctttggtcgttaaggagcacattatttaattttcatgtttgtgcagtttctgaggtttctcaagttattgacttctagtttcatcccattgtggtcagaaaagatacttgattagatttctactttttttaatttattgagacttgttttttggcctacaatgtggtctgttctggagaatgctccatgtactgataaaaataatgagtattctgcagcagtgcttctgtacgtgtcagttggatatatttggtaaagtgtgcagtataactccaatattccttgttgatttcctgtttagattatctgtccattactcagggtgaggagttaaagtcccccaatattattgcattgcagtctatctctccctttagatcaatgaatgtttgctttatatacttgggagatctggtgttgggtccatagatttttagaactgtcatatcctcttgctgaattgacctctttagcattatatagtaacctttgtctctttttaaagtagtcttttaaagttttgtaatctattttatctgatataagtatagctgctccggcttttttggtttctatttgcatggaatatctttgttcatccccttcactttcattctctgtgtgtctttataggtgaagcagatttcctgtaggctgcatacagttagggttttctctttaccaagtcagccactttaactttatgctttttttttttttttttttttgagagagtcttgctttattgcccaggctggagtggagtggcatgatctcagatcactgcagcctccaactcctggattcaagcgactctcctgcctcagcctcctgagtagccaggatcacaggcatacaccaccacaccaagctaagttttgtatttttagtagaaatgtggtttcgttatgttggacaggctagtcttgagctcctgacctcaaatgatctgcctgccttggcctcccaaaattctgggattacaggcgtgagccactgcacccggcctgcactttatgtcttttaattggagagttgagttcatttaaattccatgttattgttaagtaaggattttctggggctgttttgttgcttgttttatggttgtttttaaatttctctcttttttcttttcttactgtcattctttggggttatataattttctctggtggtatatattaattagttgctttttatttttaatgactctactataggttttgcattgtgattactatgaggcttataaaaaatcttatagatataacaagttattttaaagagataacaacttatatcacaaagaatagcaacaaaggaaaaaaacacttttactccaccctcacacatttttaatttagttttcccaattcacatatttttattgcttacctcttaactggtttctgcagttatcattgttcttgatagatttatcttccagtcttcattactagggatatgagaagattgtgcaccacaattacagtattagagtattctgggtttgtgcatacacttaattttatcagtgtattttagatattcagctgttttctgttcgtgtgtttttttctttttggttgaagaactccctttagcatttcttataagatatgtctggtggtggtgaattctctcagtttttgtttgtctgggaaacattgtctcttcttcatatttgaaggtcagctttgcaggatatggtattcttagatggcagggttttttttttttttcagcacttaaaaaatgtcatcacttttctcttggtctgtatggtttccactgagacgtctatcatcagataaattggagctcctttaaatattatttgcttctcttctcttgctgattttaggatcctctctttttccttgacctttgagagtttgattattctatgcctaggggtagtcttgttggggtcggaatctgtttggtgttctctgacctttatctgcctgaatctttatctctttctcaagctttgtaatactttctgttattatttctttgaataagctttctacctcttgctctggtttgactctctcttaaacaccaataattcttagatatggtcttttgcagtaattttctacaagatgttggcattcttccttcctttttattctttttttctcctttccttgtgtattttcaaaagcccatcctcatgctcaccgattatttcttcttcttgatccattctcttttgagagccgctaataaaattttcggttcagcaaatgtatttttcagttccaatatcactttttgatttttaaaaattatttcaatccctttgttaaattcctctgatatatttctgaattgttttttgtgttattttagagaccagtgagttttcttaaaactactattttgaattcttggtacaagtgctcacatattgccatttcattaagatctgtctctgattccgactttgtccatttaggggtatcgcagttccctgtttgctgttgtttcttatggatatgcatctatgtctttgtgttgaaggattttatatggcttgttttggtttacattgaatatgtttgtttaaatattccttgtaatttacctgtcgatttttttgggggtggggggcggcagctaggtttcggcctccttgttatgactacatggtgccttaacccaggtttgccttggttctagtaaacaattagagtgccactcataccaaatgagggtgcttccaaaggggatatcccagtagtgtgggaagactgacgaggtgttccagcccaggggacctgtgcaacaaacctcctataccatgatgctgctcgacagccactctaagttgacatctcctttggccaagtaacagagcacagtttctggtattggggatggtagtcctgcctccccactttgtctctgcctgtcctcgttcaggcaccccgatgcttcccaagtgttaaggcaggggcaagtttcctgccaggaaactcaagctggtggggaagctggttatccatcttgatctcactttttccagtatagaaatgatgtttccatgcccttgggtaccggaaagattgcagggagagtcctcatggatatggaagtctaattctcttattatctgtatggagttttttgttggtttttcactttcctgtggctccaggaattgtcttcttctcatatttgaattctaggatattgctggggataatcacagcactaatattttgttgttgttttctgtgggggacattaaagccaacttacttttatgccatcattttggagccagaagtctcctaaatgtctttatttttatttttcaggtatgatgaccaaacataaaaagtgttttataattgttggtgttttaataacaactaatattattactctgataggtaagttacatccttcattttatttttcatggctttctatgtgtgatcctattcctttctgtctcagtcatgatcttttctcagtatctcattatcttcccattatacatgataacatttaattggtacaaatgaataaattttattaattacatgacctatgtaaggcatcagagataccaaaattattgtggtaaaattattcaccctgataatctcacttctattcaacactttcttgcctatgttaatcactatcttgacttctattgctatagcttagttttgcctactaaaaaattttatataaatataatcaaatttaaatacatataaaatacaatatacaatttgcatgtatcataaatacagtcatgcaatttgcatgtatctttgtatcttttcccttttattcaacattatgcttgtgtgatttttcaatgtcatcataggtagcagaagttcattaactcactattatggaaaaaggttgaaattttttttataaaaagacccagatagtaaatattttatgctttgttagccatacagtctctgctgcaactacttaatttttcatagaaacacagtcatagaaaatgcatagacattgaccatggctgtgtgtcaataaaattgaacatggaaatgtaaatattataaaattttatatgtcacaaaatattgttcatttttaattattttgattactttatttctttttaaaatgtaaaaattatttttacctggtggttgtacaaaaacagaaggtgagctgagttggcctcaggctgtattagcggatgtttagtatagtgcattcactgctatgtatcacttttgatgaacatttggatcgtgttacattttgactattgcaaattgggtggttgtgaacaactgtataattttatatttttgtcttttaatgaatactggaaataacttgagatataagaagaattattaagcacagaatacgcatagattagcttaagtgtattttaccaaaaatgtagataatctcagcagaagtatatgagaattccaattgctccatgccatgtcaatactttattgttggttttatcaatttttgccattccagtgagtgcatgttgttacccgatttgggctttaattgacgtttttctgatgatcaatactgttcagtaccttcataattgttgtttatttaggtgtaatattttgtgatgggaatgtttcaatactttccccatattttagtaagttagctctctttttctgcttggttcataagagttgtttaatattctagatgagactctttgtagtttataggtattgcaaatatcttctttaactatgaagctgaagtttaccctctgtgtcatgtctttcaatcgacagagcttctgaattttaaagtagtgtaattgtgtctttctctattgtcactatatttttcattctaagaaattcactttacttcaaagacataaaaatatttttgtagggtttctattttcctttcactttccaaaatatagtcctcttgaagttgatttttataaattttaggagatagatattaggatgcattatttcccatttagttaatctttcaacctgaaataacttattaaaaagactatactttccctactcaactgcagttggtctttgtcatcaatcaactgtgtaggtgaaggtcatttttgctaaaattttattacattaatttactctattttatctatctttgtatctatatcattctgtctcaatactgttggtttataattaagtcttgatgtctggttgtttaaatgttttaaaagttttatttttattcttcaagtttacctggagcattttagatcctttaagctgccatataaattatctgtaattttgattgagattgcattaaaccatagtcaattttcatggaatcattatcttaatattgaatcatacatttaaaatattgattcggtgttccgtaatttctgccagcaattttttagttttcagaatagatttcacacacatccttttaagaattttttaaagactcaatgcgctataatgcaattgtaactagcatagaagtattttcattaacactattgtcctatttagtctcttgctggcctataaaaattatctatataaatttaatatatacctatataagcctcatataacaaatttgctatagttaactattcattttcataaattttcttcagtttcttttgcaagttctatgtaaaaatttacattatctgaaaataataattgttttacctattctgttggaaaccttatgccttttttattcattgtattctcttattttactggctataacttccagtataaggttgagtataagtagtaacagcttacatgtttgtctcattcttaaatcagtaaaatttttttaatatttcccaatttagtagtagtatttgcagatattcttaatcagattaaaggtgttttatttacttccctttaatttaatttaaaatatcaaatgctttatcttgatctattgagatactttcttttctctgctaatatgtagaactacacagattttgtaatattgagataagataatcttcaatttctgtgatagattcaacttgatcataacctattaaccttttaacattcttcaattaagctgaatagtattttaagatatatgcacatatatcctacgtcttcataaaagatctacctatagtttctctttctttcaatactattatcaggtattgatgtgattatgatggcttctaaaatttggttggaaagtattccctcctatcctattttctgaaagagtgtgtataacgttggtgttatgcctttcctaaacgattagaagtatttctaattgaagccatctggacagggagatttctttttgtgcaattttttaagttaaagatttaattttttaactagatatagtgttatttagatatgctgcttttatcttgtcagttgtgttaaattgtgttcttctagaaatttctctactttttcattctttgtgttgctaatttgtgtttttatctctcacagttacattttttaaaatcagttttcctagtggtcaatcctgttttagagtattcaacaaaagtcatcttatgactttaaacttttcttctatttggcattaattttttattcaattgatttctgttctttttgttttctaaattgtgtctttctactttggttttaatttatcactattattaactttgtaaggtaggataattatcttttcaaaaagtctttcatcatttctaaaacataatcttaagccaataaattttcctgtaagctttaagggagttgctgtgtcccacaagtttagttgaatcccataagtttggatgctactgtgttttgagaaagaacattgaagacacacaggattttgatgtaaaagattatggtcacagcaaaatttgtatatcatataacaggttgaaaaaaatttatgtcttgtcatgttaggtcagatgacagtagtttaggatttattagggcatttatattcctttcaacttcaacttcagtgatatatcttcctgaaggcaccagaattattctatttgtaaaggtcatccttaccatttctgggtaaatgaactataatgaaatcctagcattatctaagagtaacacaaacactaatttatattagacagtacatgagagagatatatacacatatgtgtgtatatgtatatatacacccttatatgtacacatacctatatacatatatatatacacactgtgtatgtatataaaattttatcttctatagactcttggcagcagatgactataggtgataatttaactgattattttgctactatgctccactgccatcagcattctatttataactggtagttggatcaatgcctttaaagtgaatgatattgaaaaactaacaccatatctcatcctcaaggttctgtttccttagaatcatgtttggtgccaaaaactgattcagtctgggtgtgttccaaaatacaaacacatattatgagaataaggcttttatgtagaaattagggataacatgaatgtgggaagatctggaagtgatgcatagctcaaggctggggctgtgctacaagctggaggagaaatggtcactaataatattggcataatgcactcatgcatttggaggaaagtctaagaagctaagatatctagctgccaagactgcaacaggggaacacatggaaagacctgtgaagttcctatgctcatggtctccaggaattatatcttctgctttacttccaccttccaaatctcatgttagttccattcattggctaaaccggagctatacagtgatggtgattcctagctgacaataagcagtccaacttattttgtattttgctttattatttttgttgcttctttgtagattaaatcatgtgtttagattcattagtgactaatacaaattattacttgtattactcttaggtaatgctaggatttccttttaattcatttacctagaaatggtaacggtaacctacacaagtagaataattctgttggctcctggaaggcctacgtatcactgaagttgaagttgaaagaaatgccctgataaatcttaaactactgtcatttgacctaacatgacaaagacataaaattttttcaacttatcatataatagatatacaactttcatagtgaccataatcttttacatcaaaaacctgtgtccagtgatctcaaaacacagtagcatattattctatatggtacttaagatatatatttgtctcatttccagttaaactaactcgagattctcagagtttatgcccctatgattggattggtttccaaaacaaatgctattatttctctaaagaagaaggagattggaattcaagtaaatacaactgttccactcaacatgccgacctaactataattgacaacatagaagaaatggtaagtaatttaatatacattctttgtgaattttcttgagtcggagcattagaaatattcaaacaccattataatcttgaagtcttttcactcatgcctatctatgcagaaaattgaagatgttcagagtatgccatgtgacataaaggtgaaacacctagtgatgctttgtttgaagaatgtaagactaacatcaagtagtagacttaatacctatctttatattttaaagagtgtacacagaagagcttgataatgtttgaaaacgttttaagagccaatactccaccaagaaaggagaattgtctgaggaaggaggggattctgcattctacttcctgagagaaactttgctctgacttctccattttgttttgctgcctgtctctgaggtcccgtggcagcttccattagaacactctctaccagtaatgcaatagagaggaaaatcaaaatttcctcctagaccggagtgtaagttttcagtgagcagataccatgtcttctgtgaaattttatccttagcattatgcacaaagcaggtacaaatgaaaagtctaatggatccttgttgaataaattttgatttacatgacaaaatctctatgagtaaagaggctctccaagaactttaacaagggattgaaaaactgcacctctacattcatgaaatttgttctttcccctagtcatttatattgtaaacatacttacctttgtttggtctctttaagaatgaaaagaaattataagaggtaatataacttgattaaaaatattttttgcaaataatttgctgttgagaagtgtttcaatgaaaagcagaatagcacaagagtcaacactgttaaaagacaattgtgtgttacccgtgtggtgaacaaagtttatttactcaatctgcctgaagattggttccaatttaaatgcatgtgaatcaggcagagccaatttataggtcagtgaaaggaaacaaaactattttgcaagaaaaaaaggtagtaaaatgttgaaagctagatggattaggagtagatactgcaaatcaagaattaaggtgcaagtttaatatcataggaagggcttctgtagtcaataacgtcactgctgaattttgcaagacttttgaaaatgaacattctgagaaacactctgactgttccttacagttcctcttgggggaaagaaagctaaactagcagtgagatggaaaaataatgagtgttaataaaatgaaagatgaagaaatgtaaagacaatcaatattaaaataaatgtgtccactataggaatattgtcagcaaagattgactaaataaatagtgaggatcatggaatgtgaagaccagaagtacataaaaataattagttttgaacttaagagaaatcttcaaatgtatcagggaagaatgcttgtactgtttggatgaagaaaaaatactgatcataaaatatcctgatatattttgaagaccatggatgactattatatactacatacactggcaaaatttaagtgacaaacagaatgaagtaaagctgtctgtggagtggagaagaaatttacataagaattgtaatcgattatttaaaatagtttaatttaaatgtgcattttaattacaaaataatatgagataaagtttgtcttacaaaatatttttatatctatttccacctatttagaattattgcacttctaacaaggggctaaaatggggcaagcttttattgagcaaataatgttaacatttttcatagagcaggactaggaaacacatctcccagttctctgtcaccaagaccagtcaagctctctcctgaagcctttcctgagtctagactatgaattaccctcttctccttggccgtctgcatttacacggaatattctactcttcccttagagcacatactgtgtcaaagtttcccttaaaaactcatatttttttccgtaaattccaatttcacattgtattgatcacactgataacttttccatgtctagtagaatattttctaacattatgtttacattattttcctcactgtaaatgaaggcctttgaatgtaggacaatgtttttattaatctgtttatttgtaaagccaaaacttagcccaactaattatttttttcaaattagtttatgcaatgctgtgaagatagtgtattgaaatgtcaaaagtcacaggtgtcactgttggggtagataggatttgaccatagtggtgtgatctggcctacctcctttatatttctcttaaattgaaaagtagagtgatacagtgtgaatatagtttccaagctatttagtagcagagtagcctcaaggactttctcatgtaattctatgattaaagaaaaaggtcgagggttaagcaaggtcgaggtaagttaaacaatgcatcagaagaagaaatgtcaggaaaaaaagcattgtatttatttctgaatgatgtatttggaaatttaaatgttcagcagaaaaataaaatttgataattaggttctaaagaaactggatatatgaggatgtgtatgtgtgtgtatttacctatgtagtttgggaagataaactgaagtaaaacataacactaaaatgaagctactactatttactgggaagtggacaaatagtgtaataaatatgtggtaattggaaatgctgtgcgagagctcaatttcaaacttgtctttctaggagcttacagtttgaaaattgtgaaggaatagatattcaaattgaacatttatcaatttggaatcatatctaaagaaaatgtatctaacatatttgtttcacaaaaaaaactgaaggtcagaggaaaaataaagtactttttcaaaactccatagctattttctagtgaggccaggagttgaacaattgttgccttgcacttcacaacctacgaaacaagaggtacacagtaggttgtcataaaaattggcatgtatgattttgaaattaattttgtctctaaagaattttcttaggcggtataaatgcagttctgatcactggattggactgaagatggcaaaaaatcgaacaggacaatgggtagatggagctacatttaccaaatcgtgagtttatttttttctgggatcacttaaatttagatagtgcagccttctctaggacttatgctttagctaaatttctctagagcccaagagttttgcacatgttagaaagatggaggggggattgaatatatattgagattcatgtaaggaggcaaccatgaaggttggaaattaagatgtaagggaacagatctcctagttggctattttgaaaataaagacctgagattcatatacacaactccccccaccccaatttaaacttttctctgattataaactatcctgtccaattatatgactcttctttaaactttttgttgactattttctgatgtcttttacagttcaatttcaatttgacgttcattttcatctgattttatttgcaatttcactgttatgcagtttgtcctggacttcatatctttagcattataatttggaaaatgtgtgtacacatcccaaatggtgactctcagtcacttagccacttagtttatgttagtttctcaatagaaacactactgatattttgtactgaatacctctctgtcgtggaaaaggggcacttttctttgtgcattgtagggcattggcagcacccctggataaactatccaccctactcacctctgcctccgcttgagacaataaaaaaaatccaaatactgtcaagtgtcccttggtttggaagcaaaatcacccctaattgaaaaccattggtttatacgaactgatagctccactgattacatgtaaccaacctaatgccagtttaacatgtacaaattcttggaaaagaaactcttttgatccaaattggtataggtatctcaacactagcaagagagaactgtgccatagtacaccttgcagcactttagacaagtagaatttttgtttaaaggtgtccatgggcaaggaagaaatcacatgactacataatggttaatccctttgttgcaggtttggcatgagagggagtgaaggatgtgcctacctcagcgatgatggtgcagcaacagctagatgttacaccgaaagaaaatggatttgcaggaaaagaatacactaagttaatgtctaagataatggggaaaatagaaaataacattattaagtgtaaaaccagcaaagtacttttttaattaaacaaagttcgagttttgtacctgtctggttaattctgcttacgtgtcaggctacacataaaagccacttcaaagattggcaaaaaatggttacaggtattctgctgagtttttttctttctttctttctctctctctctttctttctttctttctttctttctttttttaactgtaaaccagaaaacaattgtggggatcaaggacagacatagcacttagacaggactttcatgaccc

SEQ ID NO: 193 - DNA, 248519 bp, Homo sapiens
gggggagggaattcagcggatcagtcttaagaggagcttttttttggagcgagaaatcatataaaataaaatgaaataaaacaaggaggaaggcaaccagctgttaggggaaaaataaggcagataaaggagcggggagagaaattaattgccaaccaggaggagttgggctgtatttttcaaaggtggggagagtggagcacacaccttgaggaggaaagcgagaaagaaaagaaaaaagcaagtggaaaggggggctcgcccaagaagggtgaagaagcgaagaaagtcgaggcgccgaggctcccaaagctggcagctccgggtggcggtgcaggggcgaagggggggcggggggaaccgtcggacatgcggctctggagttgggtgctgcacctggggctgctgagcgccgcgctgggctgcgggctggccgagcgtccccgccgggcccggagagacccgcgggccggccgacccccgcgccccgccgccggcccggccacctgcgccacccgggcggcccgcggccgccgcgcctcgccgccgccgccgccgccgccgggcggtgcctgggaagccgtgcgcgtcccccggcggcggcagcagcgggaggcgaggggcgccaccgaggagccgagcccgccgagccgggcgctctatttcagcgggcgaggcgagcagctgcgcctccgggccgacctcgagctgccccgggacgcgttcacgctgcaagtgtggctgcgagcggaggggggccagaggtctccggcagtgatcacaggtaggtgagggcgcctcggcgggcgctgcaccgtccctgcggccccagaggctcgcgggtgtctgggcgcgggtggcgggcgggtcgggggcttgcgggcgtgtctgtgcgagagctgccccgcgagcggcgcagagacatccgggcgagctgagagcctcactttgctccatcggtggaatgggcacactcggaaggcgtagctgctccatccctgggaggaacctggggagccctcctggcggccccgcggaccctcggccagtgagggctggttcccggagcctagggcacgtaacccgtgctccgaatggtcagatgcactctctccttttgggatgaaagggaggatgacccaattgagatgcatgtgaaaggagacttggggaccgttgatttctttgacgttttaatggaggtaactccccttcattaggccccattcccctgaaagccggcaagggcaaggttgttgtaatggccaggacttagaagtcctcgaagtgccccaaagttgctcactgattgaagcctgcctctgggactcaccctcaccccctccacgccatcccatgtcctagcttttaaagcccattgcctgtcactcggggctgggacgagaccttcctaacgcataccccgccagcgttccccagacgcggctgcgaaacggggcgcttttctcatatgggactttatgagcccgtaatgaatttgagttctccctcctcaacctccctctctctccccttcgctgttccacagcaaagcctatagtgaaatcggacactttgcgaggattgcaaaccttagaaatgctccagcatccattttcccccctctaaatgaatctgtggaaatgcctttaataaaactggggagcggaggtgggggcggcgctggaagagaggaggaaagttttgccttttctgtctgggagattccctttctgcacaaacaatcttgccatgtcctgggacgtcttaaagtgagagtaggggttcccccttcactgcagccaggaaacgtgtgaaggcgttttgcgatcccaccccctcacacacacactttcttagaagggaaagctgtgagctctccgggcagttctgcttcttcctgtctttccatggcttggactttcacagatgtagcactgactatccagttgacatgaagacccctttaggagacccacactctgctgctatcccaagaatacgtctcccgaagcccccgctttccagctatcaaaggagagcgatacagtgattccccccaacaacccacaactgacgtcatcgcatgctatttttcctttttttttttcctccgggaagaagaaggagactgaactcattcacttttaactcgcaagccctatttgcccagaggagggtctaatttggaacagaggaaacgttatccataataataatgacgatggtgataatttagagctgtagtatgttgacttctctttccaaacatgtgaaaaagcaaagagactgctgcttggaggtgatttttttttttttttaatctgtaggtctggtttttcctagtctttacctagtaccagtgatttggaaggcattccctggagagaggagagcacagggttatgcaggcatcatcagtgaaagggtagtgaatgcattttaactatgtaagtgtgtctacataaatacgtgtgtgtgtgtgtatatatatatatacatgtatatatatgtgtgtatatatatatgtgtatatatatatatgtatatatatatatataacacctgggattccacaggagactgctttataaatgtctataattcagacaaggagcctctcttcacacacattctcttgagcactcattcactctctcacacaaagattgttgcagtaaaatactttaattggatggggggcgttaggttattattgcttgtataaaatgcctggtccattttatgtgtagaaataacattcctctcaaaacgaaaaaaataaaataaataaataagcactgctgtcgtgtagcaccagaaagccaggagcttttcccctgaggattctggtggatttcttttccctcccctagttgagttggagccagatttggcggcgtgtaaacacctggctctgagccagaaaagactcattctgcatatcctccacatggtacaggctgttggactaaaaagaacctgcttctccttgaattaaaaagcaaacaaacagaggttctttgcagaagtactttttcagctccctccttcgtgtaagtttgggctgggagagccaggaccgaggtgggcagcaaggatcgggtgcgaaggctcaccctctcgcggcgacctcaggtgcccagtttgctgcctgacctctgctggctttctctggctgggcgttgccactttcctaggaatccctggtcacctatcttgagagagcagtcatcgctcagcagggaccgcgctgctatttcaggcagagagttgctgtcttgctgtcaggccaggctgccttacatcactctttgctgcaggattcaattgggtttcgtaaaggtctaattttacggtgctgttaaccgggtctgtcgtctggcagaggcaggccttgccgctcctggtaggcgggctatgctcccagatccgcccgggatgctatttctgccccggttcaaacttcactgacaccagttcagacaggcgctcggagagacagggggaaggagcgaaggagcagtttgcttctgaagctcagaaaacatgccttttatttttctgaaaggaaaggagaaaaatatatatactaatacataaaaaaagggaaggcttatgcaggcaaaaacaaagccaaagttagaaagtgcctatgtgtaggattctctggagggtccaccagtggatggtctttaggattgaagaatcctttaaggctgctgtgaaaagggtcctcagaggttacccaagccagtttcccttttggccgaatggggagagagacacacagagaggggaggggtgtgtgctggatgacacagctcctcagcggcaggaactaggatttaatccctggcatctgacttccaggccttgccccctgcaccgctgagagaatgtgtctcataaacaccatcacctctcaccccacacggacccaccacccacacacagccttcagccttcatgcatagcaatttgggctccctttcaagtcaggggatgaggggttgtttctgacacatccctttgcttttgtaccacaccaggcaggaggaaccagacccctgttcctcatccccaactgcccccccaacacccctccagtttgaaagaaaaggaaaacaaaagactcaatttgctccatcgagcagaggccttgagcagcagttaatcttgttaaagtttctcctgacctgttagataagtgaaatgtggaccccacaagtactgccctcctcccacccctgtcccactccccttgccttagtgattcggaattcctgctcagaaggagaaaaggatttacctgaatcccatccagcacctctgcttgccagccttttttcttttgttctaatggttggactggattaagtgtgctggttactcccaagaatctttttttccttcccttctgcacccccacttcctagtatccacccaaccctcaaaaaagagtacccacattttctccacttcagcattgctgtaacagtgaaggctgggtttaagtatatggctaggagtccatatattaacaaggcttttccccagtatctgtagtcctacctgggatctagaatattgtaatagttagaactcagttttagtagccaggttacctatgtggaatctctgcccctaactaactgtgtgaccttgggcaagcaagctagttgacttctctggacttcattcaccttcctcatgtacagagtgatgatggcacaagtacctgtatcatagagctgtgtaaatgctaacagaacttggacatggaaggtacttaaaactggacttggtatgtagtaggtgctcaacaaacttcattcttattagacatgattttccaaatatctcagtcttggctttctggactggggaacacttgaaggtatgaagaaatccaactctacctgggtgcttccttggtgatgctgggcactttccttgtgccagcatgttttgccttcacaactaccctgagaagtgtgtatcgtcgcctgtacttcacaaaagagaaatctgagtttcagagagttgaaatgacttggtctaaagtcccacaggttctcagtggagagagcctagatgtgaacccaagtcctcgtttcctctgtcagcagtctttttggagagagaagaaattattcacatgctcttccttaacctttctgtggaacatttccattcctttctgcatctctatgtgtcaaccatatacctacagatcgaagagggtgagaaatggatataaatctcaactgaagccctgcatgagacctggcagatctgtttttcttttcacatcaaattatcagacagacaggcttggaatttctcttacatgctgtgtaatttgagtcaagtcacttcatccatctcttccttggtttacttatctgtaaagtgggcataatgacatcaggatagttcaatgaaataaacatgcaaaaagtacccagtgcagtgtcaacttgtattagagactcagtcaagggtagccggatctaggaagtagctgcatctctttttccagtttgcggctttggctttcaaaaagtggggcctgtttgtaaggcttcccctcttgagttgctggggagtctctctagagtagataatgtatcttggggaacaattagactccttcaaatacctttctttcaatttgatcttctcctctttgacatgctaggattacccctctgtaataagagccaaaggaggcccagaaccactgggacctttaaacaggaaaacaagttagcattcagagagagcaagcacctccagaaaaggaagccacacagatctactgtcggcctcttgctccttccccaggtgctcctcaaactctcaccttccgttgagctgccactcagtgaacaagtagaagtgataaaggctgtgaaacctgggaaagcacctcccatttttccctgcacagaggaaggcaaaatcaaggtccagagatatggaactcgggagtgtgggttgtgtatggccagcctggacatgaactcagtgatcatctgggtcaaacagctcactgtgcaacaggaaagttgaggaccagggtcacacaaaattaaactgtattcacagatgatcccctctaaatggtctgagagatcatttggtccagcacttcccattcctggctgcacctggaataaccagcttttaaaacatccttctgcccaggctgcaccccaaggattctgatgttgtgggtctggggttggcctgggaacgggtgtttcccaaagccttctcaggtaatgttgaaggaccactagtgaaaataattactgatgtagtctgacatcctcttgttctgcagaggcccaaagggtaaacgatgttccctgcttactgagctgggtagtagctaagcatttggggaagttccggtgccccagctctgaaggacccctcttccatgctgacttcctctgttcactccaaacccctgggtgccacaggtcctgacatttcattttttccagtgccattcctgtgtggaaccatggtggtccccatctttacaggaggcacctgatgtcaaatgaatctctcggagttttggagagagaagcctctttgaacaggaaggattataagaaagggaagctcagctctaaggcattcaccattcactttgccctgggctagtcctttagaaagatgtgtgttcctattacttcaaaacccctcaccttgagatccctctgaaaccagcactggctgcaggtgtctccaatgaggagaagagaaaatctccaggtactagaggactccctctatgggcaacttgtatcttatctacctgtggctgagggctcgggaatccagtaggtatctatttctctccgcaccagctgccccttctctagaacttagttccctttccctaaggttctcctaactttcttcttactgcagtaagagctctgcttcttgccttggtgcagttactggaaatgctcaactgtgattctgacatcagcagctgagaaccgacttgtaagttccttggcttgtttgaagatctgtaagtgggaattaggaggtcagcgttcaggtcctggtttggcttcctctaagctgtgtgacctgtggtctctgacttaaccactggggcctcaggggagagggtttgggggatggttactctcaatgtccccatctcatgggctgtcatgggaccaggtgagacaatgccgggagaagccgttggctgaggtcagaccacagtgcacgggtcagcatggttaggaggagctagaaagtgagagatgtgagggattagtgcaatcaaggtcattcctggaaaggtgcttttattatgatcattcacactgtagatgataaacagtgatggagttagcaaaccttttcatgcctgtgacctcactggagttctttgatgttgggacttcataagtctgccaaatcctgccacttactgctttatgaccttgaccatttaccgcttctctctggacctcagtgttctcaggatgcaaaaggagggtcaggggtaaaatagcgactttcaaactgtcaggggtaaaatagcgactttcaaacttttcaaacttctgggacaagggtgaagggcaggactctgcctctctccttcccttcaccttattccacttaaattgtgtgattctacaagcttatgtttaaaggaatatgttcctccattacaaagagtttaaatggatatggactgacattgaggagttattgttaatcttgataggtgtgatatgatattgttgttatgtttttttaaagatcctaatttgttagaaatgcatactgaagtacttgtgggtaaaattatgttttgtctattttgtttgtttatttgtttaaaaagctccagaaaaaaaaaaaaaaaggttctgggggtagtggttggtgagagattagcaaactgataacaattgttgaaaccaagtgattaaaccttggagctttaatacatttttgttcatgctgtggtgtgtgattgaagatttccataataaaaagttaaaaatactaaaagtgtttgagagccacaggaggaagtgaagtctcagttccctgcgtgttctgtgacctgaaaggtttgcaaatacggagaccaccgtttagagagggttagggactcccccaaggtcgcacaaagattagctgaaagtcgtgacacagcccaggcttcagatctgaggagctccccatcccctcctctctgtacacttgcaaactcaagtgaaaatgattatccagggagaactcgaggggaataaaagtgatgaggggagccttaggaggagcatggagaaggggcaagtggaggcttgctctgcaataagaagcttttgagtgagaaaattatttgctgtatgggactgccctacatattgtgaaatgtttagcatctttggccctgtttatgagaatttcatgggatctgttagtgattgtgacaggcccagaagtattgtgacgatacacacacacatactcatatactcacaggtccacatacccttagttctcgtttttctggttccttatttctctccatccctaactacctggagagcaattctagagccttctagaggcctggggcagtgacctgcaggagcatatgtttactgaggaagtattttgcaatggttgatcacaggactcaggaatcaaactgcctggtcaaaccctgactattgcacctgctggttgtgtgaccttgggcaagttacttagtatctccaagcttcacttttcccctctgtaaagtgcagataatactagctgttacttcatagggttgttttgaagattaactgggcctccatgtggaaaatgcttagtaatggaatctagaccatgcggtaacccagcaaacgttaactcatatcagtattatgtgtgccagccattgccacgcattatttctaataatctcaataactctaggagttagacatacttatctcttttggcaaagccaggaattgccttttcctcccttacaactcaggaaagagttattgctgtcatcttaacatagaaaaattaaaaatttaaacaactaaaatgaaaggctaacaagataaacacattattgtgtcatttaaaaaaaaatagtgcatgctcattgtaaaaaaaatctcagaaatgcagacaaagaacaagagaccaggtaaaatttgtctatttcctgcccaagcatgcaacaactattttttgagtttctgctctgtgctgggtacagttttaggccttgaggacagaccagtcaacaaaagagagaaacatctccgccctcagggagtttatattctgggcagtgggtgttggggagaaggtggagacagactataaatgaataagcatatatatcccataatgtcaggtgaatgtttgtaaagaaaaagttgagaaggaagtctaggaatgctgtgtgggagtggggatgcaggaggagagaggagtgggatatgaaaagagtggtcaagggaggccatcatcagagtagctttgaagaagagacctatgagcaggcctgaggctctctggagaaggccatggtgtatcgcaaaaggaggagcaatgctttgagctaggagatgtcagttctagcactagtttgctgtgtgactttaggcaagtcactctccctctcagaaccagttttcacatctgaactttgtggtactgtagggattatttgcactaaagacacttctacagacacttcctaggattctataatcctcatcaaggctgtcctcagacaaaactgtgaagttggcaatagttccagttttcttccttttctggtgtattttcctccactaggtggtgcctgtgcctgtcaccctcaggggccaagtgtggacacattttcggcttccacacctcagcaacactggggaaaaaagaagatggtacaccttcttgctaagtaccattgactggtaacaacttggaatgttactgctccattggtggatactcttttaggacttcccagaaagctttgtgtcacaaagcaatgtaacagtggtagaatttctaagactgactgaagacattatttggggaatattggtacttcctgatagctggaatccatcctattaataatataactaattctagcccccacaaatatccagaaaacttgctgagtgactcccagtcatcacttactgggtgaatgctagcatgttcatattttgtaatttcttaggatataaaggccattccagacaaattcctggactttggaatagaccaccggccttgtagtattgcttatcattttaatcagataactcagtgaattaaaataccaaaactctggagtctgtcatcattttccagactattttccttcagaggatccctggaactgtcatctctgaagtatatccagcttcctctcaactccctccttcttctctctcttcctactcctcatacccagcttatttgctttgaccacttggatttttctccaaacaagataaagaaaatgtgtttgttttttggtattatttgccacaaacccagggtccacagaacttggaagaatataagaggttcccctcttctactttagattgtagagaaccctggtcaggtctcagattccaacccacttggaggaagctaagacataaaagctggtcagtaacaacttggaatatcgaagtatgtgagtaggggcagcgtaccactagttgctgagacctgttatagccttgtgtgtttaggaagccagtggtccaacctgtacctattatccttgtaatcaagaagtcattcctatgcctgtcccgtatccattcctgttgctctatgaatctgaaaggtggctcggcagaatgtggccaaatgcatttatatggagggggttattttccccagtgtgactgcagatctttcagctcagaggctgatgaatgaagagagaaggctgtgttaataggctaatcttaagatgcaaggcacccaggcagaaaacataaaacattgataaatgtgatactcagttttgtgaagtaaacttcatttaagtccaaagaaacaaggtgtgtcaaagtccaaggactcatccaagccatttatttcatagatgagggactgagggttgatgaggaaagtggcttatccaagtcagtgaccaagctgggtaaagacgagtaccattgactgataacatcttaaaatgttactcttccactggtaaatactcttgcatgactgcccaaaagctttgtgtcacaaagcaaacaacttagaatgttacttctacattggtagatcctccattggtagatactttaaagtcttaagccaggtctgggtccacttgtctcctgactttacaccctttcccatagattaattacccatctgtctactaatggtagttatttgtccagactccactgggctccagactcacagatccacctgtctactggaaatgttagcacattctacaaactccacacttccgaaacaatcatctttcctccaaaattccttgcatcctcatcttggttggtgtcacccactctacattacatcatctaccatattcaatcagtcatcaactcctgactctcctgcttccttataatgtttatagacaaactctcttctctgtaccttaaatcctctttatttcttgctgtgactatttccttagtattataatgcccacttctctgaaattcaatccctgcacccccttcaacctgcccaccaacatccaacagtcacatctgtccagaatgcaaatctgactctgtcacctctagctgaaagctcttcaataaaatctgaattatttgaaattcccccaaatgcacctggttctttaattatcactttttttacttggcttatcttctatttccagtgcaccattttgcagaatgtttatgccttcccaggattttgccagagttttctctcttctgagaagcccttcataacttccccaaagtgtaacttgttccctaccttgttcatctgttcccactatgctttctgcacacttttatcaaaatacctggaattatgacatttaattgtgtacatatttgagatcttatccatctcaagttctctattgcctagctcagtatctgacctataaaggggctatatgtatttttgtttaataaatggataactggataagagaaccagtttaatatctaatgattctgggagaaagagctcaggaaccttaggcatgttgcattacgtaaccaaagcacatgacctagcatgtgcatcactgtcagaaacattacacagtggttaattccatttacccctgagcaaagaagtcagaagggaaaagaaatctggccttccaaaacagaaggggaaggggaatagtatatttaagggccttctcagctcacattgggctttctaatccaagccatattttggccttggtcttcgcctctcagccctgtgcctgtttgcaaagcatttgttttgtgtgtgcacggcagcacataatcttaagctttgcttgcctctcaaatttccctctctcccccttatcagtgtccttctgagcctcaagtgtcctggcagtcatatctgttgcttcagtcttcacccatttccctcctttctgttaatggggctttctatctgctttccttgattttccttgatcttgtgagaccttgtgatgacctcaggatctggaattctctatccgctgtttatatacccctaggagagaagacacattctcagcagtaataacagtaatgaaagcagctagcttataataagcacttactatgtgctggcactatgctgaatgctacactttgaacactctgaaactgggttataaagttgcatgactccctgaagtaccaattgctaatgggtgatgaaactggaattctcatccacaccagtttaattttatctctcttcatcctcaaggcctgacacattgcttggaacaccgcaattactctgtaaatgtaccatgagagaatgaatatatgaatgactgaatgaatgaatggtggtgccccccagtggctaatgcaaacatttgaagaatgtagaatggaaaggtaaagaaggaagagagggagggatagaggaagaaatagaggaaaaatctgaatgaacattataagatttcaaaaagattggctaagaaatctcagatatgcaaagtatattttatttgcaggtgattttcaaacataaagacattttacatccattagagcatttcccacctttaactagtcctttaggagatatacagttgtccctcagtgtccacaggggattggttcgaggaccaactccctcaatgccaaaatctgaggttgctcaagtccccaacataaaatggcatagtgtttgtgaataacccacacacatcctctcatatactttgaatcatttcttggttatttataatacataatccaatgttaatgctatacaaatagttgtaatgtggtattgttttatttgtattatttttattaagtattatattttaatttattctgaaatattttcaatctgaatttggttgaatccacagatgcagaggctacagataaggaggaccaattgtgcacttatttcaaagatactctgtttgccaaaaatgtttttggattcttgttttgagaatcagtgcctgggacatgtttccccagatatgctcaatggagcctccttgtcatcctctgatgaggggccctgatgcattctcaggcaaatcttggaattatgtgggtgaccatgctgagtgaatatggggttttgaatagaacagtgactctggagtaacaaggctgatttttgggtgactatcatcagagctgattaagccttgatagagccaatattaagctctcaggatgacccctttacagaaaagcccctcaaaaggctgatttaatctgctaaaaacaaatgcaatatcttgaccttccctttcccaaattctaaagctggagtaacagaaactgccttatcaaatctgctcagtttactgactgagaaactgagatccatggatgtttacctgctaaattaagctaagctaagtgagtaaggttaagcagcaaattggcagtaaaattgaaactaaaatttagatctgttgacttccacatcagtgctctttccactgggtcactttattttcctttacagtgtggggtgatagttataactatgggtttatattagtaagattactagaaagcatcatacagctgtttaataacttttttaaagaacttcttatgtgccaatctgctgtcctagacattctttaagattcaatgagaaatgaaagtttattaggaaaggtaaatgttccttcatttcttccttctttctaaccattcacccttctatttcatatgtagttattcagcaatttttatatattatacattgagttaggagataagaattaaaaagaagaacaaggcatagttccatgccttgaggaactcccagtcctagtggtggaagcagactggtaaacagatagatgacatcatggtaactgctataactaagcaattaacagagtcctggggaagcacagagcagaaacactatgttatgaaacacccatgtttatcatgagagtgaaaaagtgctctgaaatttcaaaggcataagtgatcttttccacctggaaggattggggacttgttcatgaagtgaatgtgtatgtatgtagagtgtgtgctctgccttgtgtgggggtatagtcatgtatgtaattttaaacatatagccataaatcaaatgagaacaatcaacacttctggattcatgcctcagctgtagatacttacccagagtatcttttaggagtatggtgttaggaaattattggacaattcaatatccatcaccatctgcatcaagccaatgcaactccttatcttccctcctcatagcatttatcacactctattgtgatttccttggtatctgtctgtttctccccaattgtctctgagctccttggagcagagaccattttggtcttcatctttgcattattccttttacttcgcacaatactagtcatgtcggtgagggctggctaaacaatgttaaatgaacgaacagattagagatggctccaaataaggaataacataaggtgattgaatgtgagtgctgtgaagaaaaggtgctttgagaattaatagcataggccttagaaagaccaaagagtgaaggcagacacattgtgagtggcattgactgtgagatatggccctggtctctctgagctaaccagttacctattgaaatgtatatgcttatcatctttccctatctctcttcctctctttctttccagtgaaccagtataccatctatgccagctttaagtcccttccatgtggctgtccttcggcctctccaaacccattctttttttttttttttttttttttttttgagatggagtctcactctgtcactcaggctggagtgcagtggcacaatcttggcttactgcaacctccacctcccgaggtcaagcaattctcctgcctcagcctcccgagtagctggcattacaggcacctgccaccacgcccagctaatttttgtatttttattagagacagggcttcatcatgttggccaggctggtctcaaactcctgacctcaggtgatccgcccaccttggcctcccaaagtgctgggattacaagcatgagccaccgcacctaacctctccaaactattcttagaaagagctgctaagagctaggtggaattgtaagggatgtgtccatgctcctcctgcaatcttcacctagaatataagaggatgaggatggcacactagattttttttttttatctagtgtgccaggaagttatcagagagcttcaaacaatggagttactggatctggtttatggtttccaaagatcactctgactactatgtgtagaatggattgcatgaggccaagagtggggtctcagttacaacagcatcatgatcgattgctgatgttatgacttagtattttggttaatataattatcatttatttccttatgaatacgagtaccaagtgaaataccagaatagcactcctattttagatcaacgaggataggggagtttttgcacttgggttcagaagtacttgatttgtaaaccccaagacattttctgtaaaaatttgaggttgtgcatatttttctggagtcaaagttcttcttagttgcttaaagggatatatgtcccccaaatggtgacttacatgctgaaaaactgggggcataccaggtcatttcctgaagcttgttcccagctctaaaatatgaacactataggggatctgtgataatgagaatgttgatgttgagttgtcatatcagactgagcaattgcactttccttcatctgtacccttgttggagtaaatagaatttggacctttttttcctctgaggaagaattagtttatttcttagaaatataatctacaactttgtttattcaaactctgctttctgagtttctctgagtttttaaataggcaagtacacttcaaatgtggtctgaagtggtcctgcccataagtattcactgtggactttgaccatgaagccacaaatccagccacctatccacccttccatcaatctactcttccatccattacccatctattaactctccttccctccctttcttccttcctccctacccccttatctccccccactccctccctctcttccttctttccttccatccacccttccatcaatccatcccctttcatccccattcattccctaatccatccacccttcttttctgctatccatccatctatccatccatccattcatctgtccatccatccttccattcttggataaatgtaatcttccatttaccaggctttgtgctaggactggaggaagagttaggaggttccaattcttgtttttatgccgctgtgagttcttaaaaaaaaaaaaatcccctgagacatcttcactgaaccttatgcttccacatagtagagtgtgaaaaccactcattgaaaactaatttgaaaagttaaagtgttctgcctgcatagttctatcatataaatattcctggtagtgctctgagtctggatctagactaccagaggctcctttatcaacagtaatattttagatcaataacagtttctacccttaggttagcaggtactggaaaaacaataggaagtttgaaatggaagcctttctttgggaaagggcaggcttaggtgagaccagagaagggagctgctagtcacttagcctctgggactcttttttcccacagcctcccaaagcccttgtttagtgatgctgagccttcacattctgtgtatgcctctggatgtatgatgtagcagaatgcccttgtggcatggggttgtttcagtttccaaagcattttcgacatctacctatcatattcccactcgccttgtaaaacaagcattttcatttaatacagtgaggtctttgtattctcaacaacaaacacatggtccaaggctctaggacacaacctgcctttttctccaacccccactttcaacccccccaccactctgtccacccttacaaagcccagtgttagcagaaatatctgtttacaaacaagtgttccaaaagaacagtatcagtagctcaaacaagcctctgaaacatgcctctgattctatacttggaatccctgtgaacagtgggtatcactggcagcagctttcatggaaggcttcctgcctttccatccttccgtctgtcctcatgtctgactttctctgtctccttccccttattcattgaaaccatggggaggctgaactggagaggcagtcagatgctggcctgggcattatggatatctaggagacaaagcccagacagggagttgcttgcagacagcaagacaaacccaaacacatccgcctgcagtgttatctgaagcagaagctgattgaagaaggattattaattgggtggatataatagtcacatgataatcatgcagctctaagcctttttctaaggtttcatcgactgaggagctgctattgctgctctctggaagttgagtctactctagctccctattacctatgcataacagctaatatatttaatgcataatatgtgtcgggcactgttcataaaattttgcatatgttaactctttaatcctcaccatgaccctctgaggtgggtactattattactgcaattttccagatgaaagatgaggaatgttaagtgaatttcccaaggtccacacaagtcagtggtagaagcaatcttcagagtgcatattctaacccctccaccataaacctctctagattctctagactggttctaaattctgtagcctcacattcaccttcctccctaagcattgtttactactgtaactttccctcgttgcttccaccagggatgctaaacctcaccactattaacattttggaatgcataattccttgttgtggagtttgacagcatccctggcctctatgtactagacacagtagccacaacctcctccccagtgtgatgatcaaaaacgtctgtagacattgccaaatgttccctgtgagcaaaatctactgactgagaaccactgacttacatggattcttctgattaaactgaattacctgatactcctaaaacacatatttctccctctatgctttttcacatttgttttcccctcttgagcttacagtgttcttggcctcctcctcatcaatcttctctgtttcatagtctttcagttcctcagcatcttttacagccagaggaaatactaacctgtctggttactgatctgcttgtttctatgccttttttgtttaaaaaatggtcaccacttccaaacttttgatttaaagtcccttaaagatccctggagtcttgagtttaaaatttagtttgtactatgcattccacgatgttttacagagtctaccatgtatcagatctcaagctaatcactgaggatatgaagtcaaaggagataaaatccctttctttcaaggagtttatgagatagactctcagggaaataaagggatctgaagatcaactctccatcctccttcagttgaatagatggggaaaccaagagacaaaaggtagatgacattttctcaaggtcagctagagaccaggatcaaggctgaactaatcatcctctacctagtgcaacaaaatttaaattatgaagccccaaagagcatctaaaccctatttatccatttagagccttaaagcgttttttgagttgagttatttataatttatgattttctaacagatgtcaaaacaatagaaatttagtagtgtatcaaacctctctctttgaaattgtgctcacatttcaccctcttcattaatgagtcttaaggctaaatgactccagattgccacatgagcactagacaggagtcctgagactttagtcctggctctgttagctctgtgactgtcaaaaggaagaccatataatccccagctaatgatccccacccacccccatggactgcctcaaaaaacaccaaagattcattcttttctatggaagaaactttagatcttttggcatgtcattcacaaccctttgtgatctagcctcagacagccattgtacttcatttccctcagttactctgtgcaccctcaatcccatcaaaagcaaatatctttctcatctcgagagtgacctttaggtggacttcatagctcttgccattgctgatgattcaccttgtgctagaaagtctttgaccagcttctccttccccaaatcctgtacctcatgcaaggctcggctcttttgagactcatccaggaaaacttccctgcaccttcttgtcagaatcaagtagtctttctgctgagctctatttgcttgtacctctactatagaactcgctttattactctttatttatcattaaaagcagccccttgtcctggtgtagtcagctttcccctgactaagcagaaatatttagaagttaaaatgtgaattctggagtctgattgcttggggttgaaccccatctttgtcacttggccaacaggttactcaggcttaggtgagttatttggactctctgagtctcagttttctcatctgtaaaatggtgataataataatatttccctgcttgcattattgtgagagttacctgagttatctatgcaaagagtttcgcacaatacctggcacacagtaatcactcggtaagcatcagctgtcattgccctccctgcctagaaaggtaattctggagggcaccagccctgcaaagtggagatctgcctgtctggccttgtccctttcttatctccctttgccatctctctcctgaaaggctcaccctaggctgtgtgggccaagatgaggtgatggcaggctcatctgagagaggagctttttcttcagagctcagcccacactgtgtgggctgtgtttttatacaacttgctgtaggcctgcatcaggtatgaaatttacatcatttgacttgcccatgtgggaatcttccccattcctcttggctccttagaatgggtacaggtgttcagtgcctcctcctcccaatgctcttcagcagatgaggaaccgaggtccaaagatgaaaacaaggctgatgactcacctgttagacacagttggcacagtgcctgaggtctacagtacttttgttaaactacaaaaatggattaattctttcttttagaattaattaatttcttttagattaatttcttttagaatcagaagaaaaaataatataataataatacatctaaaataaggaatccagactctcaattacatttatttttataacaatgcaatcataaagcataattttggaagaaggagcctatgaaagtcatgaagtgaccatggatgaaaagaaatttgcccaagattaatagtggcaaattaaagcacaagttcccgtcttattaccctccaaatagaaatttttttctctgcattttcaagaaaactggtagaatttattttaccacagtcatcttctttcacaaataagaaaacggacacctgagagagagtgtgacttgcctaaggtctcgccaacacacaactaagttgtattttcctaactccctgttactcctttcactatttatacattcaaacctaatgaccactgatgtcaacctcccattatatagatggaaacatcgagggccagaaagttgaaggggcttatatgatgtaacaaggaccgccactcttgcctctaaatcagggcgccctccagtaccaagaggagcgtttgaaaactggatacacaattttgttagacagcaggaatcacttcaagagatctattatacaacatgatgactatagttactattgcacacttgaaaattgctaggaaaatagattttaagtgttctcaccacaaaaattctaataagcatgtaagataatgcatacttaattaacttggttcagccattccataatgtatacgtatttcataatatcatgttgtacagtattaatatacataatttttgtcaattaaatacaaatacaaataatacaaacttaaaagaagaagaaaagcttgtttgaaaccaaaactccccccaaattaggtttcctcacaagccttgggcacataaatctttcatttatttatccattcagcaaatgtttattgaggacttatgtcctagccactatatggagggttctatatagtgatacagggtggtgatacaggctctatatagtgatacagggtggtgatagacatgtactgtctgttcttatgaggcttacagtcgagtgggggagagtaccattggaggttgacctcagaaatgagtcatactgtcaacagtgatcattgccatgaaaaaaaattagatcaacaactaaacaaccaaaaacagtattaggacctcagaaagactcaggagaaaagagaggctgtgccctcaacaactacatgtgggaactatcaagaaacagcccaagtgtcctgtggctggtacagaaagatggctgggtcaaagactgactacatctgtgccagatagcaggtgctcatcaacacttatacactgatggtggagactcatgaagactgaaggtctactggaagaagtaatactggtattgtcttgaagatcagaaaagagaaaaggacagggacaatagggagacatttctacctgtaggaaacagtgtgggccaaagtgaggaaatcttaccagagtctgtctacacactcagagatagattgagaccaatttctgaaatgcaaaattgttgttggtctttattctgagagcatcagagaaagaggtttgtctgtttgggggaatagtgaaaaataggattttaggaagatgaatctggtgatgcttcacaggctgtataagggagcaatgaaacttctggaccatgggccagttagaagagtgttccaataatgtaattatgatggattaagcaccagctttgttttttcataccctttatggtgcataataggatgctcattttaccaagtaacagaagaaaagctcagaccaaaattatgacttgctctaatctctgctccatggtagcagagttgatatttgaaatcatatctcacaccccagcttggaaagataaatatccctctctcctgttagtctgtgaacttgtggatagaatactatagtatccacataactgcatgtagagcattcattcaattagagtctgttgagcacctactaagtgccaccattatgctaggcaatatgtgatatattcttttaaactttaaacatatgtgcatgaacatacacacaagcaaagttacacagagaaataaaaatggagttgacaagatgagccaaggtctgattatagcaaaactgggagaaagttaccacatcagggaagcttcctttacttctccaacagtattaatggctattaatgtcttgatctctggagtactgagaggaaagacccccccccccaatatttttattagtgacattaaattgacatgtccatgtggctttgcagggacatgtaaaatatgtttctgagcttattagaaacagttctctccttcttcttcaattctgtctcatttctctgatacttcccatgtgcatttggttttactttcctcacatacatccttcatgatgcccatttcttggatgcttattgtacaccatgcactttgaaaagtgttctatgaacagtgtcttattacatccttccaaccagagctgcctcaaggtcatcacagagccagaacttaaaacagctgtattcactcccaaattgtgctcttcactaccagactgtccactgtgctttcactcatgcaagcaccctcacatgcatttctttatttccccttaaatgcatgcatacatataagcattttgtcaacttaattggtgctttctacttgccaatcattgtgctggcctggaaatatgagtggtcagtcatttgttaaaatgttgtacagatgattcaaatatgaggttaggtgtgaaaggggatgattaaataaccagtaagagaatttccagccctgactctgcctaattcaatgaatggtgaagggtcagtcttggggctgccatgcagggtatgacagcaggatgcactggtccttgaccattttctggcaagtggtatcattgtctccaggcttgatgagtgagtggagagaggagcttgtagattctcaagtcattaaaatgaccgaaggaaagatctctcttccaagacagccccaacatcagccctccttagtccaccaggatctggtttgtgctgtgcaactttcaaggatgaacaatagttcatattgttatagtgtacttctttgaccccatcccccacctcttctttctccttgatctttttttcttgtccttccccacttcctttcttacgttgatgtgcaccaattttatatgcactgatttcatcgacaatgtgtgaaaaaagagcaataaacatgcatcttcatttcagagaacagtgtcagaaaggaacctttatgtgtgtgtttaacagcacaaaaaggggggaaataatcccaattctgaaaaagaaggaaagatattattttttgtttgtttgttcatttatttgtttgagacggagtttcgctcttgttgcccaggctggaatgcagtggcgcgatctcggcttactgcaatctctgcctcctgggttcaagtgattctcctgccttagcctcctgagtagctgggattacaggcacacatcaccatgcccagctaattttttgtatttttagtagagacagggtttcatcatgttggccaggctggtcttgaactcctgacctcaggtgatctgcccacctcagcctcccaaagtgcagggattacaggcgtgagccaccttgcctggccggaaagatatttattattaacacacatttttaaaaagtgtagctacaacaatcccattctatgcaaatgagcctttggattctcttactaaatcctcgaaatggcactatttattaagtacttattattatcagtttacatatgaggaaactatcaaggagataaagagattttgtccaaggctacacagctaacagggagcagagctgagatacacagatcagcctcacaccactgtccatgtgttgtaacacttgttttgttgccagtggccatgtgccaagtgctgtcacatttgttttatcattagttcccccactacaactgtcagaggaagatgtatcatccccattttacagatggggagactaatactgggaaaggagccctgactttcccatccatagctagtaaatggcaaagccagcattcgaactcagatttactggcctgtaatcccccaacctttctacgtccatgcagactgcttacacatgagcaaaggaggaaggctggagacacaagagccagagggaattacagtttgccatcccaaatgtaccacataagtctgtgtattattaaaacttatgggtttcaggaaccctcaggcatactactctcaagcttgcctcacatctggatagccttaaatagtttacaaggaaatatgcatacatttatctcttttctctctcagaagacatctgtgaagtatacaggataagattcttcatcctagtgtacatgtgggaaaactaaggttcagagaggtgaattaacttgtctgatgtcacacagctagtaaaaaaggtgaacagacccatttagtgagggtgctttcagataacagttcctggcaaggaagaagaatacaggcaggagaacagacacaggtgccatcaagggtgttcattctactgctccatgccgtcctgcaaaaggaaatctggtcctcctcctacacttgcatggccaacacatgggaaacacctgagctaaccctgacttggagaattgttccatgtggttactttcaatgctcctgcctctcttgaacaagacacagagatgtccagaacccagtataacttggtataatcctccagtcctgtatgtctccctttaagcctcctccttccactgagcctaaggcaaatcttttgacccggggtggacccggagggatgaggatgctgaggagcagtcccccaggtaccctcctcggtgatatcccagccttcctctgaatgcctgatggtgctgagtcctccaggtcattttggtgggtctcccccccgactgaaccaagtgcagggaccatgggtatacttaacccaaatctgtctgttttaatcactgtcctctggacagataaaagctttccataggattgctctctcaagcattcctctgtggctttgatactagtgattaaatcatggaagggaaagcaaaacaaaacaaaacaaaaaagggaccagctccaacctttagcttttaatttttttagcctcatgaaagaaaccagattgttgacctaaattccccctttcatcccctcatcctctcacctctgcttgtattctcctggcagatgtcccacagctagtgggcatcctttaattgaagggtctgaaactgccttttaccctgccccacaatgaccttacatctcccgcagggggaaccaaggctgggatacctgtaatcgctgggatcttggagtcacagaatgtggatggaagggacctctgtgaccatgtggtctaacactcttatatcctaaggaaaggaagtgaggaagcccagagtagggagctattcacccagggaccacagcacagcatggcagacctagacattagagccttcatggtggattgagagcaccaatccaccatggaaagcatcttggtggggagctttggctctggagtgaaagagatgagagttagaattgtgattctcccaatccctcgctgggatccttggagggaaaatcaattaacctctctacatctcagtttccttatctgtcaaaagaatactaataaatcccacttagtctgtgcttagtaaagagactactaaatagaggctttcagaaagtgtttgttattattatcattatttatttaaaaataccactttttcacagcagaaatgtcctggtggagttttttctccttctatatctactctcccaatgagagaaaacaaacaataatacgaattgcatataaattgtcatcctttgctaattatctccaccccgccgcccccagacagtgatggcagaaagtcaaatgttatcagagataattttatgttgacttaaagcttcccaggaaaacatcctaggcaagaccacaggaagaaagcatagctagagtccccctcagctgtgggggagctttcaaatttgaaatcaggagactcgaattccagtttttcctaccccttagtgctgtgggactttaggcaggggacctcgcctctctgactttccagttttctgatctgtaaatagtacctattgtagcagattgctgtgaggattctaggagacaccttgaggtgaggaatgtttcctgtaagtgatgaacacaccaccaattttgctatctttctaatacaccttgctctactcaaaacagcaattgagtaaattgagacattgcattgtaacaagagaaaaattctgaactgggaacaggcattaggagataagatagattttagaaaaatttcagtgggagagcttagaaaacttgttgaatgatggtttgctagggcaggcataacaaaggaccccagcctggctggcttaaatgacagaaatttattttcttaaaattctggagatcaaaagtccaagatcaaggtgtcagccaggtttgtttcttccaagacctctctctctctctctttctctctctctctttctctctctctctcactggtttccagatggtcatcttttccttgtatcttcacatagtcttttctctgtattacttgtgtcctaattttctcctcttataagaacaccagtcaaattggattaggatctgccatgtcacctcactttaatttaattaccttttcaaagactgtatctccaaatacagttaaattccaaggtactggggttacatctttaatgtatgaaatttggtggaacacaatttcatccaccacaatgaaaaggaaaatgggaggcagccaaaagcatggcagcaagcttgggaagaaaaatcagtatcgacattggaagttagaggaaacctgagtcagaaaccatcaggcaggtaggctggtaacggaaatccagatgtcgaaggacaagctcaagtaagcactccagatggacaactatgcctggacaaactttgggttctagcgaagtgggctgagcccagtggaatagattactctttggtaataaagaaccatcaattcttagttaattgtttaggtccctacagaagaatgataaagacagcagcctcctggctttcaattcaattcaccttgcttgtgggggtgctgcagaacttacagaagtatttccagaggaggccacgcctttaaacagcctacaacaaaacatttggcctttggcacttaatgtattgaccatgactaagagcctgggtgtgggaattctatagacctgcattctgagctgtgttgctttgggcaaccatttccctattctgagcctcagtctatcctgaagagggagcaatgctgatagacttgttgtgaagattaagcaagataattaacgtagagtaaatgatagtatgttctcaataaagagtaagatactcttatagagaaggcagaaatagggaagtatccccctgctccctttctttctttctttttaactttcaataacaaactctacagagcacttacaacataccagattttgggttggatgttaggtatttataaatgaagcaaacagccacatatgtgggaagcacagatcttgaatgagtaattactcagtgatgaggcagttttaggatggggaggagtatgatgaatatacaggaggaagatttgttggtgcctgggtggcatggggtcgtcagacagacttgtcttggggtaatatttaccatgatgatctttagagaatacccctaatgcccagagtattctcccacactctgtacagccttagccaaggttctgagagactctttccatgcctttgagcttttctcctttgtggatgttcttcctttctgggatgagattgaatgagtagatgagaagaaaaagaggcaatgaaaaaaatagacatcaagcttctgggggcctatggaacccttttcacatccagcctagctgcaggaagatagggtgcattagaaagatcagctggccagggttccagggatggttccgtaacaggaggaccatggcaggctcctttcctgctgcacctcaacctctccctctgtgcagtgtgcccagacacactactttaaaagggctcttgcacgctttcattgtctagttctatgtgcttatagcattgagacagacatacgctaattatatgtagattgtgtgcagaattgcatgtggccttcggttttgccacatgggactatatcccctgggatcatcctctagtcccacacagatggtgctgacttcagacaaattagcaccattttttttttgtactatgcctctatctttatggagaactgtgaggaagggcagtgtggagacgtgggggttcttttgtgtcctccagagaacagcattgtgtgtcctgtatagagatcctcagaggagacagaacctaagcatgcaagagttgcgaatgacataaggcatctaattccaatcaacacatatttttgagcaccttctccttacaaggaaccattctatcagtgaacaaaagagctcttaaattctagcaagggatcatttttatccagacccctccttttacagagaagggaaattaggttcagcagcataaaggaggtggtatgacttgtcccaggcaaggttacctgacaagtcaagctcagatctctggtgccaaacttctggttctgagctggtggtacaacgatgcttccctttcagaccctaaaataagactactgttgattaagttatgttcatatagaaataaaaccccattgccaccatacacccccaaccttattgaagctcggtgattttctttcactacttatactccaggtaaatatttccctctgaacttgtgaagccgctgcttcaaggttctcatttcccttaatgtgtttctttttggttccattgaaaaccttctctttgcccttcctctctgcctcccatggctaagccaccccttatttcttaactcttttgcagaatctgccttttctcacttcttcccccttctctcaactgcaaacagaggtggcctgagcctgggtcccaagccccggcaaggttctgaactgagagcaccctacagatgtgtaaacattttaccttgctaaccaggctagctgccttccaaaggcaacaggaaaaccagagactgggagcccctggcaaaataaaaacctgcagagagagagagacagagaaagagagagggaaaaaggatcttgttttagattttaattttctcattagaaggccattcattttcttttcatgagggatagggttagctgggagagagagagaaggtgagctaagaggtgggaaggacatgaatgtcatggctccaggaacctctgctctcaactggttccataacaggcagcaacagatagatctggcgcaactcacttcaaatctggagttggatcttaggcttttgaaggagtcagtggggaggcagcttttaatatgtagtctcatgatatcatctaagctgacgggatctatgatttctaagaagggtttgccagtgggtttgaggaggacctgggcttttttgagccttccttcttgatatgtcgtgcaagatgccttcagggtaccctctctttctggcctttctattttgtttcccgtcatttcctccctccttttcatcctctacatcacccctgaaccctccagcatcttaacaatgaactctcatttggacagccgttgtatgcggaggatgtcatattcactatgtcttttaagtatgacaatatatttagagatacagatgaaggaattaaggcttagaggtgaagtgattttgccccatacgtacaactagtaactgctgtcatcaaaattcaaagtaaattaccctgagtgcaaagatcctgatctttctactttaccaagaatacattttattctctgattctccctgtactttagtcacagagacataaattaatgcctttgattctgtttgtccttaaaatccctaccctttctcgtctccggctctatttagaatcattcccatgcctgctgtagcaaggtgctggagaggttactggaatgacacagacacaaccattgctctcgagaagaaaacagttcggcagagaggggataatggtgagaacacaggcaactccaaaaccgaagagcacatgtcaagtttcctaaaagtaaaaagagttcaaagaagagaataatcactattcacagggaagtcaggatgaacttcttgaaagagttaccttgcatgctagtcattgggaaatctagaataaagaaaatcagacttggacctaatatgtgacacagaaccttacttaacccgctcctttaccagatagagaatcaggacccagaggacaccagaggaggcatttggtgcttcactaaggttgtcctgatggtaagagcaggatgactttgtaaggagactctggccatttcctgaaaaatggctgagcaggaagtaggaggagaggtgtagattggcatagatgctggtccaagactgctggccatgtcagctgctgacaaagagatttacaccaattctaagctcccactgcccacagaggagtgaagactgtgtgggcctcctctattgattttgctggaagctctccttgctcatttgatgagcacttatagcaggtgaactcccagagttatggtgactgcaacaattctccagctgagagtagtcactgtccttctaaatgagcatcttttattcactctcctctccctctctttcttctcccacctggcctcatacatcatctgacacttaaaatacactcttaattagaaagtcctcttccccatccaacagctttgtctatgccagggacactgggtatattccagaaaggctaggaaatgggggttggtgagcataaagataattagatccagagagaatctgctaacctacttcctggggttcccagagtaactatagagatgcttggcttggaacttcctcaaatattgaactcaaatttgtgacatgccccaggtaggtggcatagcccagatgcctgatgattttggtgaggcagggggagctgctatagaattagggcctaggacagtgaatccaaggatctgatggatctaggatccacttaccaagcagttgaccttcaacctgtctctctatctcctttaacttccatattctcaccagttaagtgagaaacgtaatgtcaccaccttagggatattacatggattaagttagtgcatatacagaccttagcacaatgcctggcctgccatagaggcttgggagattttgctcattattattaactattatgtaggcatacccaatttatgttaagaaggcactcattatatgtgtgtgtgtgtgtgtgtgtgtgtgtgtgtatctatatctatatatctatatagatatatagatatagatatagatatagatatatatagacagagagagaggcatcagtgtaagaagaaagctgaattgggacacaggggaactgtcaatgactctgtgacataacaaatgccttccattctctgggactcagctctctcacctgtcaaacaaagggtttggaggtgatgatctttgaaaacctgtctagtttagctctgaagtgtgttttctttctttggggataaatggcaagattcctgttagagaatgaagttccagcttttcaggtcctgaccctcacttttatgccccaactttcctgacaatttaatgccactgatcatttaatgactgctaatggcagatgtacactcaaagttctggtaactatggtagggacctcccttctaaatgagcatcttctgttcgttatcatctccctctgtttctcctttcacctcgtatactatattacacttaaaataccctcttaattacaaagtcctcttccccatccaacagctttggaaaatggttttcagatttttattattattgctgctgttgttgcaacaacttcattagatgaagtaccctttcttcaaacaaaaatctttcttgtatgcttcatattcaaaaccaataaaagttaaacttcatgggttaaaattgtgatgaaaatgctccaaacccaacttactcattctctcagctcctccagcccttgccttgccctcgaggtggtcccagaggcaccattagcaactcctaggatcccacagagcagttggaaagcgatgagtctaggataacctgatacaaattttattagagaaaaataacttaaccccccctccttttccatcctttatttattcatctttctcttttggggccacatagggctgtatgacaaatgttcttatatctcacgtgaccgaggatgggtcgtgggcattcacaccatcagtgaccaagacaacaaagacccacgctactttttctccttgaagacagaccgagcccggcaagtgaccaccatcaatgcccaccgcagctacctcccaggccagtgggtatacctagctgccacctatgatgggcagttcatgaagctctatgtgaatggtgcccaggtggccacctctggggaacaagtgggtggcatattcagcccactgacccagaagtgcaaagtgctcatgttagggggcagtgccctgaatcacaactaccggggctacatcgagcacttcagtctgtggaaggtggccaggactcagcgggagatactgtctgacatggaaacccatggcgcccacactgctctacctcagctcctcctccaggagaactgggacaatgtgaagcatgcctggtcccccatgaaggatggcagcagccccaaagtggaattcagcaatgcccacggctttctgctggacacgagtctggagcctcctctgtgcggacagacattgtgtgacaacacagaggtcattgccagctacaatcagctctcaagtttccgccagcccaaggtggtgcgctaccgcgtggtcaacctctatgaagatgatcataagaacccgacggtgacgcgcgagcaggtggacttccagcaccatcagctggctgaggccttcaagcaatacaacatctcctgggagctggacgtgctggaggtgagcaactcctcccttcgccgccgcctcatcctggccaactgtgacatcagcaagattggggatgagaactgtgaccccgagtgcaaccacacgctgacgggccacgacggcggggattgccgccacctgcgccaccctgccttcgtgaagaagcagcacaacggggtgtgtgacatggactgcaactatgaacggttcaactttgatggtggagagtgctgtgaccctgaaatcaccaatgtcactcagacttgctttgaccccgactctccacacaggtaagaccttactgggctaaagatgcccagttgaaagttgaacttgatgtcctccatattatagataaggcacctgaggccagtgggtgatatggggattttctggttcaaccagcagcttcatgattgaggcaagtcttttactcgggtcattgtggagaccataggtaaacccagtttattataaaaatatttattgagtgcctaccatgagtcatgagggaagcctgagagccctgttttctcaaagagcccagagttcaaattgagtgatataagctgagtacaaatagctgttgtattgtatgacatagagtgggtgagagttgcacagtccaatatggtagttcctagcaacatgtgcctacttaaatttaaatcagtcaaagttaaataaaactcaaaattcaattcctgagtttcattagccacatttcaagtactctagccacatgggactagtagctaccatactggcaaagcaatatgaaacacttcagtcatcacagaaagttctggtggacaggctcaaagaggtggggtcgcatggggctagaaaacctggccccatggtctcagctctctgtgacttcttcattttgtaacttcttagaagctgtttcttcatctgtaaaatggggagaataatggtacctattttgtcaagttgctctgaggattgatagagagaagacatataaagtacactctcttacagcacatcattaattctcaatagtatgtctgtcattacttgtctaatgaaaggtagtgtgctgtgtttagggagtgccctagatgatcaaagagaaaaagttgatttgcagcttgactatatcagggaagccttcttgagagaggtgacatttgagcaaggtcttcaagaatagctctaatttgaaggatgttagaacaaatctagagatctaatgaacaacaagatcaatacatttggtgtaatagaacaaatctagagggctaatgtatagcatgaggactataggaaataaggttgaactgtatttgggattcatgctaaataaccagattttaaatacttttggcacaaaaccaaaagaaaatggatgacttaagataatggatatgttaatttatttcactataataaactgtttgctatctatatgtttcccataacatcatgtctaccttaaatatacacaataaaatttacctgaaaaaagaataggtaaaattttgacatcagaaattgggtggaggaagaagggaggacactccaggcagaaggaatttctcatctactgctaaaaagaggacagaaaagggggccttcagtctaatgcctcacttagcctctgccattgctgtcagttgcaaccagtaatccaaaagtagagcccaaaaggtgaactcaagggtaacctgtattaaatgtgggacctggaggaactagattcaagctggagagaccatcaatatccactttcttgtttttcccagattcacactgaacttttctattctgtccaacacacaggaccctggacttgctgatggctcgagcacatttgccgacctctgcaggttttctgctgactcttctctttatgtctctctcaaaagagcaagggcctcccgtgcgtgaacaaaatacctatgtgcaaaggaatgaggatgctggcaggagaatgccctgcctggcagcaagtcagaaagcacctcagctcagcttcccggcaccaggagggcccctggactctcaccttggctccaagacatgagcagcccatgtgaggagaagccttggtgtgtgaccagtctcttctaggtcacagtgcattgtcatctctgctttcacttgggcctttccaaaacttggcaagggagtcaacacagaggttaacattcacatttgactgatgggaaatagaggaaacttagagagtggagtaacttagctaagttcatgggtcaagaaaatcattaggctaaatcacaagtgcaagtctatgatcagtgtgctccaccaaactagactcccaagaggtacctctgtgcctggtgagagtgggcgtggggtaggatgggcataattggaagtcatccattcatttgtacatcgatttatttgctcattcattcactcattcattcatgcaacaaatgtttatgcagcacctgccaagtgccaggaaagtggatacccttagccctgttttgctttgaaaatttcaagattcagaaagatgaagggacttacctaagctcaatctgctaataaatggatagcttggattcaaactcaagactactaggtccaaacctcccatggaaggaggatattttttaatctaaggaacaataaggggcaaaattaaaagacaagtgatagggagagtggcgctactaaagttttggggaaaaaaactgtgtatcattgagacaggatgaagagcagctggcctttgcagagcaccatgctggtgtggaggggccatggggccccaggttccagacacctcacaatcagcagacagcactggcaggttccaaaggcctcctcttttctaagtcacgggaatgcatgcccagagtgtctgtgagcgaccatgagccagctataaccgctgtgaccagggcttgtttgtttgctagctgggaaagctgtatgccctgggtgaggcccaccaggtcacgtgtcatctcttggtgaggctgggattttctgggttctggccgattcagctctcctgtgtgcagacagaaacctgtggaaggttgcagataaatttttgctttgtgaatttaaacaaaaaagggaggaagggaaggagggaggaagggaaggagggagggagggagatagggagggtgggagagtcatgattacatggtcatgacacatacacttcaagctctgaaggcctatcctgtgggaaagtcacagaattattctatatggtttctaagccatggctgtgactacagtgttgcaattacaggaggcagctttgagctgagtaatagatgatatcatctccagtcagaatggtcctttttggggagggctttgtctgtgggtgagtgagctccccttcaccagaagcatgcaagtcagtactgataaccatgcataatgaggccataggtgggattacagttctggtggagacggtggccttgtggtcttggggttgagcactgcacagtaatatcttattccatttcatatcagaaaaccaaatattgactgcttctcttctctttaacaggcatttattgggcatgtctatcccaccagcctttctgctcttcactgggggtgttgcaatgagttggacatgttcctcaccattaaggggcttccactttagtgggaaagtcatatagaaacataagaaactctgatttgtaaatttagagacacacagtaggacaggagactgaaaaagcagagatttatttgactaggaaaacaaggcaaatcagctggagggggcaagatttgagtaggcatttgagaataggcagcctgctgagaggtaaagatgcagactccatcagtgagggtcctagcaggaaacagatggcacattcaaacagaataattaaggagaattgaaggaggggctgttttcaaggagaagctgtttacaatgttgtaggcaggattaaggacaaccaacaaggccttgtgctatactctagggcgggcaaccatggagagccatttacccccttggcctgtaggggcaagaggagaaagtggttatgggacccagagagagggactgtatggaggggatttcctggcagcagctgtggctctcagcaagggaagcagccaggctacagccacctgaccagaagggaaccaggagagtaaattccatgttgtcattctctctgcctgccagtctcctgccagtgcttcccatttggtggatccaactgaagtcacaaaacaaaggaacctgttgatgcaatccatagatagccagcctcccaaggacacagagcagggtggggagtggacctgcattagcaagcagagaatgtccagagcctagagacagccagcccatgcagagggtagggcataagccaggcagtggagagggtgaggagtggtgtatagaagagagcatggagtttaaggggttattatggctgagatccagaccatgagcagagaaaagttcagtttatctcacggaaaactttaatgttaggcttaatcctctgttccttcctccctacattcttcccaccttcccttccttctgtccttttcttctctcaataaatatttgttgaatgctctctctgtgccagcccgatcactgccctcccagagcttaccacctagtgggtaagacagagaagtcaacaccccactgcaatcactggtgtgaatgaagggtccacagtactagccaggaggagcagtctgtgtgagcagtaaatgcctttctatgagactagccagttagaaaaaagacattccaggtgaactgtggccattctctacagtggtggagaatagccagggaggcaggacttcatctgcagccattagagatgtctccacgcaggtagaatgcacttcacacacccttttataaatgaaatggaaaacctggatattaatagaaaattccagtgtcaggaaatccaggggcatttgacactgaagactgtagctacctcactgagagaggatattgcagcaaaccaaccaagttcctgtttggacccttccaaaccctggcaccctcaagtgaactcacctttgttcatgaatatctactcatacaaaatgggatgggtggaaaaaaagacactttccctatacactgttgtctcataaggaaacatttcctttgtcttctctttattattatttgggaattatttcctttgtcttctcttttttattattatttttttgaatgtaacaaggacaatcccctgaggccaggtttttgttgttgttgcttttggactccagttaatgttgttggaagtctcacaaaaggggctgcgataagtcttgaggtcacccccgacccctctgctggcagctatagcccccgttagcctcttcccctgctctaatcagggccactgaatgatttgtcctctctgggtggggtttcctacttaatttctgatttgatctcatggagcataaacttcatactttcctcttccttttcaatctgaatgaaggactctcagagcttaatggatcagtagatgggtccagtactttcttgctgcagatggggagactaagccctcaaggaggggcagacactgacgcaaaccatccattgagaggggggctgagctgcgatggagacccagggtctcacttcctactcccatgctttttcaactacaccctatagacaccttagacaccagcttaaaacctggaaaggttacatttagtatgtttatgttcttacccatcatccacattccattaagacaccttagtatccagagaactgtgataaatgctgtaggggtccaagatataatctctgtcttcaaggtgcttgtatcctgtgattcaatgacattttgttacagtcattcaagagaaggcaagagggcagatgactaatttccctgtaaaccacatagcctataaggcttccatgagctctgagaaagggcaggatcactgtggtttggagaagttaggaaaggtttaatgatggagaagggatgcaataggcttttagcataagcaggctttgtaataatagaaaagagctggtgggctggccagacatgtagtgataatagggtaaataaattgaagtgggaagatgttgaggagatgcaagaaagatgtgagtctggttggggcttcatgaaggtagatgccacagttttttcttcagactgtagacactgaagactcgggctgatttagaatgaaagaattcaggtgaaacagattctagcctgggctgggcagtttgttagctatgcaatcttgggcaagccttttaatctctctgagcctccaattccacatctatttggaaggaataatagtatctgactgcctggatcacacaattgccatgagggtctcataaaataatatcccagaaagagttctgggaagagttaaccagcatgcagatgaaagggggcattgttatttttcagtcactttgttcattcttttccagtaatcatgtaaaagaaattgcttggaattttataatcagaatatcagggtttatttaatgtgactaatattcattaaagcaataacaggagtcaggtctggtgtagtggaaaaattatgcgtgctagagactgaccagggtttgaatcttggctccgctctgcactagctgtctgaccttggcacattgctcagtaagagccgctggtttctcatctgtaataattgggtgatagcagctatcctgtggcatgtcatggcactcaaatggagtcatctgtgtgagacacctggtatggtacagtgcctggcacatggtaggtgatggagaaaagtctcctccattcttgtgtgcacatgtggacaccatatcctccctgtcagcattgttttacagagactgtgttcctacaggctcataaaaaaaggcctggatgaaactgccatatacaaattgagagcatttgctgagattattttcgttctcaaaatattaactttttttaaaggactagccacagaattggtatttttaaataaagaccctataacttctatcaaactcattgagttattgaatttgcacactggcttacttttaaaatgacccaaatgtctggcagtgttaaaggacatatttctgtacaaaaccattccaggcaatgttgggatggctcataatgagagatatgccagacttgtgaagttactatatgtttccaccatctccagccctcatgcctgcttgagggttgatacacagacatacagattcaggcatactcacacatatggtttgattttctctgattcagtctgggttttcttcatgcttttcttctgaacaaagtccacctttactcacaagttccatctgtgagacttgcacacatataactttggtcttaagagcagaatagaggggtgaactgaattaaaagaagaactgttcaaggcccctaaagatgaggttaataaggagctcgaaacagtgacctatgaggaacagtagaagatcaatacagtctagcaaataaataagaatacaagttttggagacggaacatactacagtcaagtcatttaacagttctgtaaccttgcacaggtctcttcctttgtcaaagactcagtcacctcctctgtaaagtcaggaatgaaagtaacagtctagtgcattgggtggtttagaggattggatgaaataatacacagtcaaccttttaggacagcacctggcacatagtgaagtctgaaaatagcagttgttattgctgctgttgtttgggaattgccctcctccgatagatcttctcgcttcttattgtgcatatcccgaaattcttagccccttttcaatcctgagccccctcactacaatctcagtgcgggagtaagagacagaagtaacctaatcaaccactctgtactaccaaaagcccttttattttatcatcctcaggtttcatttttaaaatattttttttaattccaaaagtcctgtataaaccgaatgctaatatattgattatcccaagagataagcagcatgccacactaagtttaagcatttccagcaaaaaagcaaaggcatgtctgggattccaagttggggctcattgaatagtgagtagggaaggaactggaagctgggaagccaggagggtacccataatgtgctcaggactacaccaaccaaggctctctcctggcctgggactcttgccccagcatactctatattctcaaagtttacagataaaagttggaactcctttgcggggagaagtcaggaacatgccaggatctgaggtcctccttctttcatccctttcccaaatgttgtgttccctgtcccattcccagctgcctggatggatggcagtactggtgccctttcaagggcctcagcaggaggcagttggttttttcccaccctgggtttggcatgctcagcactctcattttcctttctgcatccactgatgacactgaccactcatgacagcctctgcacttggtcagatgcccttccaggttaggaaacaaagccgttgggcgtgcaagagatggttgaactgacagacagcagcacattttgttttattgaaatacattttcctaagttggttacagctcagcttgttgcttcaaactcactgctgggcagttttccacctcctgagagggaacctccacacctccactctcactttctgaaaacacaaaactagtgtgtgaacagcattgcattttgttcatgggtttgtttgcataactagaatatgctcgtgttttcccatttttcagaggagcattttctgtcttcctcctttctcctttcttctctttctcttttccatgttctaggttgttttagtggcctggtggtgaagggtggaggagcactgtctccacatcgagcttctgatgtgtttgattcaaaagttgtgtgagttcaggcagccaactgcagctcttagccttgaacttgacttctaactactgaactatttttatggccacagagggcaatgatgattataactccacaaaatcatgaagtaagagagatgcaaaggaggtttctttcccatgagaatccatggtagaaaaacacagtttgccagtggtttggccaagcgtgaggaaggaattgactagattcttccaggaacttagtggccagcatgaagtatgacacttttcttctcttatttcaaattcttcatctgtaaaatgggaggatttgaggtttgttcatgcacacatattctcaaattagacattggaatcctgtttccaagattgtgggaagtagaactagagtacagaggatgggcttaatatttaaaaggtacaaataaagccatgcactggcactggagacgccaagggatataagagacagtctttgccttcagaggattgaccagcccctgtaactacttgagtacaaagtgttcagtgtggtaatgaggagcaattatgctctatgacaagttgaaaaaaaatcctactcatatttctcaagtcccagcagtggccttgtgatggtaccccatactggggcagtctacatgtctgctattttattttcccttaggctccaaatgtggcatcctctttccaaaaatcaatttgaatttatttctacttttgacagcctggcatataatgtcatgctttctagcatcatttctctatacttgaactccttgatcatcacatgactttctaagagttgtctctgtttaaccccaagggagacccaaatttggagaagttactagacttattcaaggtcatccagagggacctacatctactgtacggcctgtattgttttaattttaaataaatttgttttttgcctaaggttaggtgatttgtatgggactatggtccagattaaaatttagacattgccattttaacacatattggtgattatataattcttgatttatcctttctaaacttagtatattttagttagtcttcacatcagttatatgcctacatggctaaagtctagagccaaactatgcagtcttctgaaataacccttgttcctaaaacattgactgctgcagctcatgaaggagatgtgattgtctttgcttagttgtgatttaagcataagacaaatcacagggctgttagtaagttgtgcatattcactcagtgtggtcagttgtgttatttatcaatttggtttgatgctccaagaaggaagtgaggtggtgggaagagagctgtgggcccttgaacggtagagttcagttgcaagaatgattgtctgacatgagataattgtattactactgtgttgcttttgaacacagcatcacaattcaattgtgcacctccttacttagcaagagattcctcaagccttaatggctgctctgaaaatatatgaactcagagtttctgaggctgtcaaaacagagattggagtaccccaagagaagatcttagggaagtgactattcatccaatagtttgtgcatgagtgtgtgtgtctgccttctatgtgccaagcacagtgctaggtgctagaagtacaacattgaacattgcacaagacatctgtaattctgcccttttggaatttcctgcagcaagataaatagctagctgcataattgctgttacggagaagtccaaggtgctgagcgaacacagagaatggctacctgactcagacatcgggggtcagagtagcttttaggctgtgtcctaaaggatgattcgtgttaacctagtgagtgtagctgagcttgccaggaaccaggtgttctgacactttgctttctgtcctaacaatctctaaaattattttccaaaaggtaaatgagaaaaatagcagctgtgtagtttctagtaaaatgcattcattgtaaagtagtgtgctttattctgagattattttttcttttggagtgctactcaagtaccttttattttatgatatgagggacctcatacatggtggagtgtttttttttccccttttgaatgctttatttattcatcgaagttacacaaactgctgacttccatctcaatgtttattattaggttgctgcagaagtaattgtggtttttgccatttaaaagtaatgttgaaaaccgcaattacttgtgcatcagtctaataatatcccaaaagtctaagaaccttgccactggcacactctgcttctctgaaccagcacctggtttcctctgaaccaaattctcaggattctccaccccacccattacctggtcccatcacgatccaatccacaaggagctgaaggccagtgattttcctatgggttagccttccaagagactcagcaaaggacatgccgttggcagataaatctctgcatttagagcagcaataaagggggctttgatatgtagtgtctgtgactgataaaagaaaaatactacaggagacaaaatcagaaaccagaccaacatttcagcttccctcactcccaccctaactcagcatcagatttttccccatgtgtgaataccactacttcttatatacattcctattgctgtgagacactgccaatgcctccttctccactttcaccacctctactccatctcccaaattccttcagaaatctccctggaaaatgtaaaccagatcattttatcctcttacataaaatctgccagggtctgcttgggactcccaggacactttcaattctccattgcctagtatacaagacccttcctgattgtcttagtttgctgtatattgcttcagaggaatacctgaggctgagtaatttacaaaggaaagagatttatttggctcatggttctacagacagtacaagaagcctggcaccagtgtctgcttctggggagggactcaaactgcttcccctcatgcttggaaggggaagaggagccagcatatgcagaaatcacatggcaagagaagaagcaagagagagagtggggagacgatagagtctttttaaccaccgactctcaccggaattagtagagtaagaactcactaccatgagaatgacaccaagccattcttaagggatctgcccccatgacacaaacaccttccactaggctccacccccaacattggggatcacatttcaatgtgacatttggaggggacaaatatccaaactatagcacagatgtagccattgctgtcccctccagcttcatcttcctcaaccttgcaagtgagggcttgtaatgtctcttctcatgcttctatgcttctgggctttctggagcttctgccattttctctatttcccacacttggttcaatatcaaaccaaggtttattctttatgtgaaaacctcagtggcttctgaccctccttcagctgggtgtcattgctgtatgctctcattatatttaacacccacccactctatcataacacatataataacaggaagtaagagactaatggctaaggatatggtcggtagcatccaacagactaggggttgtgtcccccctctgacacttttccaagtggagggaccttggaaaagtggtgtcagccctcttagccttggttccatcacctataagttggggatactctagggcttttgaaaagcttcaaaaatataacaaaaatacttcaacagttccagtgtgtagtaaactttcccaaatggtagtgttattaatgttatcatattatgttgtgatctttcatttattcgtctcactttcttcataaaacttctaataccttgataatgaaaatcatgctttttttcattgtctgtaggcaaagtttctggcttaaacatggtatttaatagaatctcagtaagtgttgttgatgaatgaaagcagaaaagaatgaatgaatgatatgtggaaaggaaagaaattagaaaggaagaaaggaaggaaagaatgaaagcagggaaaaagaaaggaaaaaatggaggtaaggaaagaatgactcattcaataactaaataaaggaatgatcaattttcaattagtctttgattgatgctattatgttacatgtcaggcttccatacaaaatctgttattttggaaactaatcattcaagattccaagaatttaataaactctcccagcattttctttctgtgtctctttttatagactggagaggcagatttaggtatttttgacaatgaaactaagcaggaggatcaagtccagattgttagggcccttgggataaagaacaaaattcaggtttttgtactggtcacagcttggagaaagcttgttatttggaacaaggatatggatgcaataaacattctgaggtttatcttgctttaatgacttgccttaagtggctttgatctttatatttgataatcattttcaaatggtctggtgtgttctgaaaattaagtagcggttcatggacttgagaacctccttgggaatgacaagctacaatcagaatttggaaatgggcaatgttacagaatttgctctatgagatggagaaacaggacaacctcctgtgaagaaggtaaacacattaatccagtgttgggaaccaggtttggctggtggagcgggaacccaacaggcactgggagctaaggccagttttctttcaatccatgaactagcttaaaacagaattctgcatctcgagggtttttcatgagttgggtactcttctaggcatttccttgtgcattacctccttgaatttttgtatcctcctttcttggttgaattttctaattcccatttcacatgtgaggaaattgagataccaagtgacagggtcagttgtccaagatcacagagccactttgtggaagaaggaggatttgaacgccagtttgtctctctcttaaaatcaccctctgttgccttttattctaacctgaaagaactgtttccagtctctaggttgcttaaaagtggcccactcttggccagtgttcagctcacacaaaccttcctccagttgagggcatctacgcatggccagtaccatctctgtgaccagccgcacccatcaagagcccaggaagcatgactctggcgtgacattgcttaaagatctcctcagctatcacttctgcataggggaagtccactgaagagtgacctgctttgagtgggaatagaaattgagagtcctcagtcttgatctgggctcactgtaagctgtaccattgaaacgggaaggccagtgtattatgcttctacaggtgaaaacaggccttctcacacttttttcccatgattttatttaacggatttgttgttgttgctgttgttgttttgcattttgaatgtggttcccttttgcttctctctcaataaaacaggccctgacagccctctcattcagattattacagagttgtgccatctcaggccagtgcatttaggaaatattttgttggcacttaccaacgagtgagatgcataaagaaaatattctaatgacagttgagttgagagagctttgatctccctccagaactgcactcatggctttgaaatgcagttctggcaaaggggtaaagtctgggcgccttggcaatcagggctgggctccctgaaatagacattccaggggacccgcaatctcaatagtgggatccaggtgcatgggttgtgtaggaagacaagagacactgagttaccactcttgagaggcggctcaggggaaagtttctaaatcaggagggacatttcaatctagccaacattttccaaactttgttgtttgtactgctgtttggtttttggcaaaggtggaagtgtgtaaggggaggggtgtggaggaggaattatggtcacatatttttgggtacacttcctgtgctatctgtcttactcttattttgcatatttgaggctccaaaaattcttgcaattaaaaaaatatgtatttaaccttgtttaacagaccatgtcccaaatccatttgactcagcgacatttttctttaaatattcatcattttcttacaaatttagccctctgtagaccatgatctggaagacattgatctatttcacaacctcactgaacaggtacggaccctgagctgcagaacaaccagcagagtatagtgagaagtggtcagatattcaggcaatgcaggttcccacacccaggtgtccagctgagggagagaatggaggctgccatccttcccatgatttgttctctaaactttgcagggaactgtgtccacctgaaggaagaaatgactttacttatgatacaaaattgctgctatacacaagtgacatgtacacaggttagagcagagaggtttgttggcaggcttttctacaacctgtattagatatatgaccttgggcaagtaattccctttccttgagctctggccttgctcatcctgttttgaaactatgtaatttgagagagaggtgctcagtagctgcccatcggtggtggttctctcttgaaggatacttttaagtgatacggagataataaagatttggtcccaactgccagaagctcattacctgatggaaaagacagatgctcacacagtgaatataacccaaagcagattgataagtactggaattaaaagtagggggcacagaggaaggaggactcattttcagatagaggtgatgatgatgatttgagtgttgttaataatttttgttttgctaacaataatgcagtaaaaggagcctatcctaatcagtgatgccttctctgtgccagtcaccatgctaggcacttaacccgtgttgcctctaatccttatgatgcccctgacaggtggtcatcatcatccctactctacagatgagagtggtcataagaggatacatggagtgcatcacatgtaagctggactttgcagggttcataagatttaaagggccaatcatcaggaagaaagattgcaaggcagaggagggaaactaatgggcattcttaagggttgggcataactggggaaaactagaggttctcagaataagaaaaccaagagaacttgagcggttgaggttgtagaaggaagaaggctgggtaatgaggaagagacactgaaagctgagactgggagagccacgcagaggcagactgtcagtttaggttctttcccagcaggagaaaataggagaccaggatatggggggctcacattttctagttatgtgctgggactgtgctgagctgtcttatttaatcctgttgggatccgcatgagctaattgatactcagagacttaaacctacttgtccacagatataggtctatctgtccaattctgagtagcaaagcttctacgcagattaagccacacagattaagctacagattaatacacacacagcttaatctacagactaatacatgcacagagttggacagacaacttgcccatagatataggtctatctgtccaactctgcgtgagtctgggattttgattgatttttctgggaagtgagtaatgtttgtttgcttttggttttgttttaagagatggcctattgctctattgcccaagtgggagtacagtggtacaatcatagctcactgcagccttgaactcctgggcccaagcaatcctcctgtctcggcctccgaagtactgggactacaggcatgtgccaccatgcccagctaaattttttgaattttttgtaaagatgggatctccctgtgttgcccaagctgatctcaaactcctggcctcaagcattcctgccgccttggctgcccaaagtgctgggattacaagcatgagccaccatgcccagccctgacattttaaagtacatttgaccaatttacgatgtatacacagggacagccttcccaaaaattgcaaaatgtaagtcacatggccattttccttctctcaccttcactatccctagacagtaatgttccttctaaatttgacctcctgtgctttctcttctatcttgttgacaaaagtgaaaaaaaaaaatcctttcaaggcataggggtagggaggtaaatacccacatggactcctgtcccaaagattttccccctgatatatttgagagacactcagcctggctctgtattagtgggaatacctcgggcagcaaaaggaaaactttcatccacagagctgtgttgttgctttttttttttttcccccctttgggtgggttcccctaggagaggtggggaagagagaggcctggattgctgctgtggagtcttcccccttagggaaatggaggcttcccaaagtatgaaaaaaaaaatcacatacaagccatgaagaggctcccacatcccacttctctgctttgggctaggatgaataccacttcttgaaaagattggcttctgcaattaccactgaataaacaaccaattaaaatgtctcccctgcccctaccccaccctttttctctcttgaagctttctcatctcagagctatggggcagaggtggctttctctaataacatttgtgttctctgcctgagagaacatttgatggaaatgaacaaatcaattagaaaataataaattatgtggaaagggctgatccaagaaaatctcagctcctctgtgttttcattctcctcccatgcattgtttctcttttcactctgggcctgggtgagcttggaaatgagggtgaggttgtgggaagggttggacacatctagatttgtacttggccttgtctccagttgtgtgatctctgaacccctcttccttcatctgtatgatggcgataagtgataagaatagctaaacatgcactgaggctttctacatgccaggcattattctaagccctttacactctctttattaactaccttaaccctctgaacagctgtatggggtaggtagtattatcaccctcattctttatataaagaaactgaggtgcaggaagttaagtacattgcccagggtggcccagacataaagtggaaaagctggattcaaaacctagggctgtagcttaagaatgagccatctcacccactctgttgcattgcttcaactaccaaacagggatgagacatgtgtacctagcacagggtctggcatacagcaaatgcttaataaatgttggctgtctccttcctcgttctcttccctgacgacagagcagactgattagaattcctcatgagatttccagcctaagaagttgaatgtgggttcttggggaagagaagggctcagcagcgagatttcaggtcaatatctgagtttgtgtggctattcttggaattagtcagctacacctagacataaatgtaagctctcctgggcccacctatctccaactcatgttttttgtgaaaacatgtacaaattatggtcacaggaatgtttggtttcgtgagcttggggctttctgtgacatgggcggccttgacacgctagatctcagacgtatcctattcacagcagggtagaggtgtaggttttccacccatagaaatgatctgtggagcatcaggcagctgttactaatttcaatgtattgataaggaaactgaggccccattagtcaggaattattgaatttgagactgagagttaaatatttttactcttactttccctaatttaattcaattccatcaaaatctactgagggctcaccaggtatcaagctttgtgcggagaactgggtaaacagagattaataaggcacctcgccttcccccaggtggccacaagtgtgtattatgtaatagaaagaggaagcaatttattgaaatggcaaatgagagacagtgctctgctagtaggaggtggacgagtatggagatgttaaaaggggtgcaggtgaggagagcatcagggaagtcttcctggaggagggataccagaacagactttggatttgttcattagagaacaaaatgctgatcagagtcccagcagaggaaacagcatgaataaaattgccaatgggataatgcaccgtacagggtacagagatgttttctgtatgcagtggggtgctcaagaaaggttgtagagatagatgaggctaaggagtaggttgtgtcttggaggctatattgggaacttgaactttgtctttcatacatggggagaccctttattattctaagaggggaagagcaggaaaccatcactaatgtgtgctactggctgggctctgtgagaactccttgggagagacagcattaagaaaaaggaaaacattgctaagtagcaacttgaacttagtaaggtatgaagaaggttctctaagcctctggagataacgatactacctacctctgtgttcataagaagcctaacaactttggcaagtctctaaaactctcgagaacttaattttatgatctgtaaaatggaatcatcttacttataatattattgggggaattcaataaggtagtatttttaaagtgcttagcaaaatgcctggcactcatagtagctctaaattatttggagagggcctgttatctttttgggggcatgataacagccaaggttctttttctgtttcagagcctacttggatgttaatgagctgaagaacattcttaaattggatggatcaacacatctcaatattttctttgcaaaatcctcagaggaggagttggcaggagtagcaacttggccatgggacaaggaggccctgatgcacttaggtgagtcttagaaactccttcaggaggcaactagagtaggacagtaatacacttagtgcgatgatgatcattgttacgatcatgatggtggtggtggtagttgtgagggtgaacaaccgatttatttatcactttttaatttacaaaattctttagcatcctttatctcattttgaccaccaagcaattttctgaaggaaatagcaccatattattaaccatgttttatcaatggggaaatgagacccagagaggaaatggggcttatccaacatcacacgcaagacagtgacagtcacaattggaatttaagtttccaacactgcccattgtttgctttctccttataccctctgtctcctagttcctgcaaatatcttctcagtctggtaaccacactgtactggcacagccagtcatgggttggcttaaaagacaccaaagaggcaagaaaaagtgagtttgcaagaactctgtgttcctccatgttccacccaccaacaccaacaggaactcttcttacattcaaattatacatatccataaacaagacataagtttgtacaaaccaatcaccaaaagttagacatgacaacagtttctgaaccaggccctgtaagcaaacattgcagttctttaattttattttttccatgctctcttccaggacacatctatatgtaaacatgcatttttttaactgtacatttttaaaatcatagcatagatgaaattctgtgttcttttttcacttaatattatgctatctacttttttttccatgtcgcagaagtcttatccttaacttcccacccatatttttttcacttaatcacaaaagaaaagcacccttgtgggttattttcccctctctaaagccaagatttttaatagccacataatattcccttgaacaagggcactgccatttatttaatcattttccgtttggtagaatgttcccattatttacaagaatgaatcgtgatgactcagtgaacatctttatctgagaatgttcaggctcagcagtgacagtgctggatgtatcctcaggcctgcctggtctcctggtgaaacagagtccagtagcttctccattgctattctgtcttggaaatgagagatttaaataatgcaagttttgctcaatgaaaccatagacttagttccctccagacgactctcatttctcaattgttttttagagaatgaaaccaatttgtgtgtgtgtgtgtgtgcgtgtgtgtgcatgtgtgtggttgtataaataaagatagatacaaagataaatatctacttgttctcagctgggaggattttatgccccaggagacatttggcaatatctagagatgtttttgcttcttacaaatgggggaatgctactggcatctagtgggtagaagccagtgatgctgctacatgtccacaatgtccactacaaagaattatacagactaaaaagtcaatagtgctgaggttgagaaatcctgagacatatggtgtatgggtagatagattggcagatagacagacacagacaggtggggttgggcagaagagagcgtgcagcttaggcaaacttgaagatgatcagcttatatcacatgcctagtatgatatatgggagtaatgctagactagagccaaaattcgtgtttgttctcagctgtgactttacttagcagtatggccttaggcaattctctttccttcctcaggtctcaatgtccttcaatattaaataagcaggtcctaggaggccagaagaccctaaggatccttctcagttctgaaattctgtcctattagaaaagcaactgaaagggccatgatcagagtctgagaaggattgagtagcaggcttctactgttagaaaaaactactcctgataattccataaatttcagagtctggctcagggccaggaataagggaggctataaatccatagcatgttatagtatttcaggatgatgtcaggctcaagctatttcaccttttaagagaagcaatgaaacaggactggggcccaagtgctgtcactctgtgaaaaggggtgagttgggaggggatgaggtaaagcaaacagggctagcctagacattaagtctgcaatccaatcatcatccctggaatggtcctgtcctctcattacctcaataatgaagcttcatggagagacagagaatcattggcattattgtagctgcttattttagagctcaccagagatgcaaagtccattttccacagtcacaaggccagtgtgaagcagaacaaggattgcaacctatgtcagctaactccagctggactccaggctgccctctccccatcccaagagatgctgctcatgagtaattcctctgcagtagccccaatcaaacccaatttattacaaccatatttttcccctctttttctgctattacaccatgatccctggaaaaagccttgggtgggaagcggattatgtttcatgttatgattgacagaaaataattgagaaagatttcctgtctcaatttctcttcctccctgcctctgcctgcccccttctcatacccaagtgaatgtgcacacccgcacactcacatgccctctcacacatctttatctttgtgttagaaagctctaagcaattcaaaattgctcagaaattcaatctctgaaattaagtcctccagtgaccctaacacggagacagagtccttcttcaaaatcagagacctctgcatagactctatgagtcccttgactgagcaagcacaccattccagaggttcagtctaagataaaaccctccatgcccatgtggggcttgccagctcaaatcaacaagaccctacctcctcaccattcttttagaagatgctgctctacacctaaagtacctactttcaaggttcacagacctgagttttaaccttcccttaaacattttaaaattttaaagtttaattatctctctggcagcctgtatgcatctttccaatgcctaaaatgaacacagcacaaatactacccataaattctgctgagatctgttctgtctatctgcccaagccaagcaattctcaatcttctgaggcatgtgatatagaccattgcttctcaaaccagaatatacagacaagtcattcaaggctcattttaaaatacagattgtgcttctgtaggtctggggtgaggcccgagattctgcatttctactaagctctcaggtgatgatcatgctgcttgtcctcaagtgatgtacttgatgtatggaggtgctattctagttctcacactagattagttaaacctcacaaacttctttagataagttaacattcagcaaatattcaacacatatttaatgagatactctgctccaggccctgtgatagtcattaatcatagaacgttgattaagagtcctgctcaagtgacattagctagtatgaaaactgttacaatggtgaatacagcatggtgctgaccttcattagcgttcatgctcttacagcatcagggatgaagatatgagattcagagatgctaattactccactcgatgtcacagagttagtgaaggcaaaatgggaaccagaaccaagatctctgagcctgagggctttgtctagacaagaatatgtagaatatttggaaataagagtaggccttactttgtaagggaaaggttgcagcagaaaggtttactggcccagaaatcagagtttctgaattgctctccattgaaataatttgaaatcaccttgggtaagtcccttcacctctttaagcattggcgttttcatatgaaaaataaaggaattgtacaaaatgacttttgagattccttcctgctctgataagtcatgattcatgccataggttgtaacagctctcagggcaatggagtcctagggtggagaagcttgtgtttattttgggcagcatctctttatccttgatggacttgggggttcttgcaccaagaagcagagtacctagtttgcctgattctctggatttccccttacaggtggcattgtcttgaacccatctttctatggcatgcctgggcacacccacaccatgatccatgagattggtcacagcctgggcctctatcacgtcttccgaggcatctcagaaatccagtcctgcagtgacccctgcatggagacagagccctccttcgagactggagacctctgcaatgataccaacccagcccctaaacacaagtcctgtggtgacccagggccaggaaatgacacctgtggctttcatagcttcttcaacactccttacaacaacttcatgagctatgcaggtagggccctacactctgtagggtgaacaggtctggatgtcagatgtgggatccaatcctggctcaggggaaccttgaacaagctacttaccatttctaaggatggaaggcctagctctgccacttatccacctaatgtctttcggtcattctctttctgggtttcacttttctcaagaaaatggaattgttggactagcatctccatgatccttcctaaatgtgcagcacatttttctaagctagtggttgttgaaccttttttatttaacccatgtgtcccttagataagcataaaactctcacattctctgttattttgcaagaacaatgagagtgctttggactttgcaaagagaaaattatgacatgagattgagtatgattttttttttcctaactgcatatatcttatcatagtacttttgagtaccactagtaacagtgttaggagcattaggggatgccctgcacttccctttagcatgggatacatcaaggccttggagcccttttagcacctttggcaaattagaacaagacaccccttcctcagggctgtcatagcccttaccactgcacctgcagctaagagtttttgtgttagtcacaatgcacacaattgcacatggcaggccagcatcaaattctgttaccatactcaacttagtgtctttttccccactagaacaagcaaattctatcaagccaaagattgcatctaatacatcactctattctcagaagtcagcacaggggccagtgcttaataaatgtttgttaggaaaggaagaagtaaagaaagaaagggaggagagagggagggctggagggaaggaaggaggaaaatgaataaattctcttataacaggtatataaaatttattcttatcaaaagcaatatttctactcatgtaacaaaatattgtccagaaaggcctttaatatgctctctctcatttaattctcacaacaaatgtgtagagtcagaactatccccactctacagatgacagctttgaagctcactgaaatcatttgcaccaagtcacatatctgactccaagtatttttctcttttactcttgtatttcttctaaagagagctagctgatggttgagtggggaaattgagcaacctgggtggcttttacactctgttccacagggatgcttcagggcaactgccctggtggctatatgagtagggctttaggctctcattcctgctaaagccagggaaaacacaccccctttctgactattttacatttctgttgaggttttgcctcattgcatttgaagagaggaatttgctgctggaacccaaaggtttctgtgatccccagtggttctttctgcttgtccatttgggctgatgacccctgggggcctctccagtataaggttcctgcagtccaaatctgaattgaagtgtcaataacccacctctggtaccataaagagtcttagatttgagtgctcaaaaaagaccagggtgctgggtatttcctgaaaagcagattcccactgggctcccattcccagccaagctgacatcccacatccggtgccccatcccctcatacaacactgctaaagttccatttctatagcaccttttcttggccagctcaacacacatggaaaataaacaataacataagtttggaagtttgccggcctcttaggggctaggagctgccactagctaccagacccccataaactaaatctttttttttcccctttgtacagatctaaagggtgattgatttactattttttttaaaggaacccctcagctcagtgacccattaacagcagaactaattcactgagctacgataacaaacttacacccacaaaagcatattcaaggcaaccacgatctttgaaatgtttgttttccttgggatttctgatagatgaggtgacaaaagcagctggatgcaattcaaaatgcagaacaggactgggttctcagggctatggagagccatgcatgggagctctctccatcaagataattgggtgaagacattgctgggtcaacttcttctcgttgctttatcttcctgggtgcttcttcctcaggcctgatcactggtagggtaaaggtttgtggtgcagcactgccaacagaactttctatgaagatagacatagtttatatctgtgttggccagtatggtagccatgacctctactacccatgtggtaactgaacgattgaaatacaactagtgtgactaatgacctgaattatcaatcttattttaactaatttaaatcagaatagccacatgtggctggtggctaccatattggttagctcaggcctgcagtaattcttgagtacgtgtgacatgccggacactgtatgaaatttttcataggcttgtctcattgaatccccacagtagcccaaggaggtgcacaagttttacagatgcagaaaatgtggttcaggtagcttaagtatcttgcccagcatcacaaagataaaacaaggcaaaggtgaaatctaaactcaagtgtttcttactgcagagcctgtgttactaactagtaagtatctgcctcattttctggttgtggggaaggttgagagggccacaaatgctcagatcaagcaggcaccaggcagttgatggggggaagcctaattcagtaggcaggctggacagagctccagaggagtatagttatgttgaactcttgggtaactcttggaaaactcaacagataaaagagtagcagacccagttccactttctggagataataggctacaagagttcctggaggaggacactctggtcctcaaaactgcaggaagccaggctttctctagcctacaggagcaagtgtcctgtccccatctttctgtgtgtcatggcttcttaatatgcacacatagattgacccagcaattccacttctaaggaatatatccaaagcaaataagtcaattggtatgcttaaagatttaaccgtaagaatgttcttaatgatatttgtttcctaaatatttattaggcattcactatatgccaggtatagaaaacaaaatgtttgaataattagaaactgcttacaagcctaaagataatgcattgctgaagtgaactgcaaggtattcatgtgataggatattatagggccactaaagatgacagagaagatgtttgaaggacatgaacagaagtggaataacatggtggttcagagcatgaaatttggagtgaggagacccaagttgaatgttcggtgcccagctttgatcttcggcagtttacttctcctctctgagcctcagttatttcattaataccattgatgataaggatgcttgccttgcctgattgtaggtgtaatggtacaagtgaagcacttagaactgttgttgttctaagtgcccattaataatagactggataaagaaaatgtggtacatatggaatactatgcatccacaaaaaagaatgagattatgtctttttcagggacatggttggagctggaagccattgtccttagcaaactaatgcaagaatagaaaaccaaacaccacatgttctcacttataagtgggggctaaatgatgagaacacatggacacacagaggggaacaacacacactggggtctattgaagtgtggagagtggtaggagggagaggatcaggaaaaattgctaacgggtactggccttaatacttgggtgatgaagtaatctatagaacaaactcccttgatacaagtttacctatgtaagaaatctgcacatgtactcctgaacttaaaatgaaagttaaaaaacaaacaaacaaaaaagaactgtccttggtatcataattagtgctcagtaaatgatgattagtaggattattcattgactacttaatgtgaaaaaggtcagaaagccatatatatagtgtaagacctgtacatatgtatgtgatgataagaattatagaaatttactgtagatatttacatccatatacaaacacatatatatatacatacatatacacacatataccttagacatcaattttattatctataggtaatgagttcagggtaatgtttattttttgtaacattttgacatattccagatactctacagtgaagtttttattataaaattattatctacatctattattatgactattattactatcattatttttaaaaacatcaaaaagacagagagtttcacacaaggcaacttagttatccattcactagacattagttagcttgttaaatgctctcatcagctttatgagacagctaacatcttattcctcattttatggtgggtgaaaatgtggctgacggggggtcagcattgtgtccaaagtcctaagtggagtgaaggcatggtattcatgacctgaacctccatgcagtgtgccctttcagccacagatggacatttgttcttgagaggaagattcagttagcaaacccagggtaccgtatcaacagcatggggactggcataggcttcccagtgctgaagtcccgaagttctttctgctttgggacaagatacagacagaagaacaagatgagctggccactcctggagaccagatgaagtggccacagatatcaagaggggaggcactggggggaaagaagccaagtgggactgactctagacattagctaattgaggcagatcttttgtgatagatgaaaaccctttggtacctctccccagattttgatagctgctaagtctccaagtaatgtaccttgggatagatttcgacttcagctttttttttatttttattttttgaggcggagtcttactctgtcgcccaggctggagtgcagtggtgtgatctcagctcactgcaacttctgcctcccaggttcaagcgatttgcctgcctcagcctcctgagtagctgggattacaggcgtgcaccaccatgcccagctaatttttgtatttttggtggagacagggtttcaccatgttggtcagggtggtctcgaattcctgacctcgtgatccgcccaccttggcctcccaaagtgcagggattacaggagagagccactgtgcccagcctcaacttcagctttaaagttcaaatacattcctgtctccctactaggttccatcacctacccattttttcaaacttatttttatcaacaaatgtgaaaatggttccattttaagttataaaagaaaaatacacttttttgttgggggaaagcaagtaaagtagatgtttatacaggaaaaaacctactgtttttcagtgtcattcatcttgagaaatgctttttgtgcccttgctcattgaattctcacaacttcatggtttggagtttatttaaatgcccccaatttatgcacgagggaactgagtcttcaagttgtctcattttttggtcatgtctgattagtattctgttctatgtctgtgccttaaagtacacagccatttccctatgaatgaacagatgtgctatttctaatattttcaccattataaattatgcttcaagaaacatctttgtatgtctattttacccctgtttacccaagagtatctatcttttgaatccataaattccttattgttagatcaaagagaatgcatattttatatcctgaatttttttcctgcttccagttttctaacactcacacatacatgagcacacgcaagcatacacacacacaccacacacacactatttccaattcccatgtactaacatttatcatggggcaggcattgctcttagtgccccacacccctgcaccttggctgtgttttgagatgagcaatcgcgttatcatcactgtcttcacttcacagatggggtaactgaggcactgggggcagaaaatcacttgtccatttgactccagattctgtgtgcactaatctagtcacgtggccatacttcttcccttagccatcatgcccttctcctgcatgtaacctatttggtggcttttccaaagttttcaagatgaagtacaaagttcatggcaacaaagaaaaaagtgtccaattatctggcccttttcggtctgaggactttttccttgcaatagggagccatagaatgtttggtattcaggagttacatggtgggatctgggtttgagagagatttactcggttattcactatactgtgtttgttaagagacattgggctcttccacttctccaaatgtgttaaagacttccctaaggtgctggaaaggagattggcaaaaattactaaggggatttaaggcagcttctgcatagaacctccctcacaccctgcaccttccctaagctggattctcaaagccatgtatatagctgtccagcacctgcccaaatgtatttaatgtttgtttgataagaagaaaccagtatatgctgcaggattcccagtagcaagtttattttaagattggaagagccctgtactcctctgtctggggcccagctgcaggctccctgaccaggtggacacctctgggaagtggtgtttttggaaattaagccaaaacagtgcattgccctgtccctagggcagttgaataaaactgttggagggagaaatgcaagcgttctccctcagaaccaggtcttaggtcacaccctggaaaagagagattaggatcaaaggtccttagatctaaagacacctgagagattgtgttccaagctcccttagcctcagactcaactcccatttatcaaccacctgcaggattttatatccatacaatgtctcatttatgcttgaaaagaagttctcatattgatcagaagcatggccttgaagtcaggactgcctgggttcaaaccccagatgtatccctagctttgtgattttgaaataattatttaccctctgtcagctttaatatcctcttctgtacgataaggaaaatagtagtgcgtactccaaaactccagagaaggaaaggggtttaccgtgtctaaagcacagtgcaccaatggcagcatggagtgggagatgttactactcatattttcagcatgcacactaccctggtttgttcccaggtctgcctgactccctggcctgtgctctctgcctaaggcaccatgcctctgtagtcatgcagcactttctcctgcaatccctctcctttcttttccaatcttagccgtgcaatctgatcagcctcaactatctccttctttagaagccttcctggtcgcctgcctgtccctgcacccacccatgccgtcttcctcgctttatcagtgattgacatcacagactttagtagccttgtaacaaccttgactcatacactggactggtcttgactccataactagacttgtacctcatcatgggcaggaacttttaaagtttcatctttccatgcccttgggcacagagcagaaatgtagtagacactcagaaggtttgtttgaagggtaatatcagcacattggttaatagtgaaattaatgaatgagtggatgaaagaatgtgaaggaatgagttggaaccagtgagtgcatcaatgaatgagtgaatggataaacaagtgaatgaatgaatgaatgaatgagagatattgagtggggggtgagggagggagggagtaatggaattgttgacttagtgcccagtggatttgggggccatgggaaataggggaaatagctcatcttgcctgtgtcctttgccgtgacctctgggctgctctcttcccagtctcagccatactttttcagttacatccacccttccctccctcctgtttcctctcacctgtctccagaagtgatgactacactaatttgttcacaggccattaactcttgagagctggaagaggccagccctgagttggcaaggaacgacttgggtgctgactcttgggccgccaggagccgtcattactctctcatatgcctgcctgccttgcggcttggtgcttatctctccctctgcctgcttgcagatgacgactgtacggactccttcacgcccaatcaagtcgccagaatgcactgttacctggacctggtctaccagggctggcagccctccaggaaaccagcgcctgttgccctcgccccccaagttctgggccacacaacggactctgtgacactggagtggttcccacctatagatggccatttctttgaaaggtgagtgtgccctgtgtagtgttgatccctctctctctctcctgccaagaagaaggaaacttggaagggaagcagacttggagagggattttactgcatttcttgttcttgttcaaaaggtatctccaccacctagcatgttgtaaatttgggatcagggaataaataaatggtcattaatagaaacaaataaataacaataaatatttttaagtgaatgggtacttagattcactttgttattagaaacttggaaacctcttttgctacagacctcttctgggatggaggtaatagtctcatctccatgagctcaggagttgtgattgcctgggcaaaaacatttatattatattatatattatattatattaattatattgtatcatattatatatgcttatatatggatatatatatttatgtgtgtcacgtgtgtatataagtacatatttacatataagaatacatatacaaggccgggcatggtggctcactcctgtaattccagcactttgggaggccaaggtgggcagatcatgaggtcaggagttcgagaccagcctgaccaacacagtgaaatcccatctctactaaagcacaaaaattagacgggtgtggtggtgcgcgcctgtaatcccagctacatgggaggctgaggcaggagaatgcttgagcccaggaggcggaggttgcagtgagccgagatggcaccaccgcatctcagcctgggcaacagagcgaaactctgtctcaaaaaaaaaagaaaaaagaatgcatatacatatatgacatataaacataatttttgcaccaaatgttttttttttttattttgtagaactaaaggtagcattttataagaccagggaatgataaactgaggcacaaggtacctctattctgctgccctgactgttcgttaattaaccacatggccttgagcaagtcactttctgtctctgagcctgattctcccttccctgaaaactgggtctaatgatactacagtggcttgaaggtggagacctgaatcaagtggtctcttgtgatctttcccccatataaactccttgaggagctcaagctctaaggggaccagatttaaaagggtcatgaaaatagaccaaggtatttgcatctattttggaattttgccataattcagggaagattaatgtattacctctactcccagcccttctttgggatgcttcatctagtaatggtgatatattaatgatggtaaaaataataaccatgctaataattagttaatattactttattgtagttgctgggatctatcaagtgcttactatgtgatggattctatactaaatgctttacatacagaatctcatttaatctttctggtaaccttgtacaaaacaaatcatcttcctcatctgctagataaaaagagaattggagctgaaagaggctgaaaggtgaccagagggtcatggaaagtggcaggcactgggcttcagctcttgttttgtattgtgttatctcagactcgtatgtgctttcattaagttgtttcagaactagaattggagaaaaggcattacactgccccccgcaaggcaaaaaaaaagccacaaaaagaagcaagaaattctcatttacaagtgtatttgtctgcatttgtgtgtgtgtcaaagacatattaggcaaaggacctaaatagacacttcaagacacacaaatggccaacagctatgtagaagaaatgctcaacctcactaatcatcaggaaaaggcaaattaaaaccacaagaaggtgtcaccacacacctgttagaatggctattaccaaaaggaggaaagataagaagtgttagccagggtgtggagaaaagggaacacctgtgcactggcagtgggaatgtaggttaatatagccatcatggaaaatagtatgggggttcctcagaacattcaaaatagaactgccatataatccagcaatcccaattctgtgtatatatttaaagaaattgaaattagtatgccaaagagattgctacactcccatgttcactgtacattattcacaatagctaaaatatagaagcaacctaggagtccatcatcagatgaacaggtaaagaaaatgtggtgtacagatggtctccaatttacgataatttgacttccacttttttgtcttcacaatgacaaaaaagtaatatgtattcagcattgctttgagtattaagatggtataaacctattgtaagttgaaaatatcgtaagtcaaaagtgcattttcaacttaccgtattttcaacttaagataggtttattgggtgagtcctaaccccattgtaagtcaaggagcatctgtatagacacaatggaatactattcagccttaaaagcgggaaaattctgtcattttcaacaaaatgaatgaacctggaagacattatgctaagtgaaataagctaggcacagaaagacaaataactgcatgatctcacgtatatgtggaatctaaaaaaaatgaattcatagaggtagaaagtagaatgatgaccaccagaggcaggtggggtgagtggggaaagggacgatgttgatcaaagggcataaagtttcaggtagatgggaggaataagctttagtgatctgttgcacagaatggtgactctaataaatgataatgcattgtatatttcaaacttgtgaaaaggatagatttcaaatgtttttgccaaaaaacagtgtgagagatgatggatttgttaatttacccaatttaatccctccacattgtaaacatatatcaaaacatcttactgtactccatgaatatatacacaatcattatatgtcaattaaaaataaaatgttaaaaatttttgaaacctatttgatcacagtaccacataaaatgtgggcattaatttttcacattaccatcagtacctgagtctagaacctaaatttggtagctggcgaatgtgatcatcagggaaggaaatgcacttactatgctctgtagaaattccccttcccctgccccagccatcctcactgggagcacagagctgggtttgggaaacctcgtgtgacacttcagaggtttccagcaggccatagatttatttactttttctgtggtgatgagaagtatcagacttttggtcaagccttggcctccattccacttgaaaatggaagtttcataaatgaagcttcctgtgtatgtatttaatttatatttcataaagcagttactgtccattaaataaataccacctgattgttggaaacctatttgagggttaattgttgtgtaatgagatatgtctctattacacagtgtccttagcttcaatcaatatgtttttaatcacctatagtcagttggttcttgaggctcatatagtagctattctgttcagtttaagatttcataacatagttatcatacgttaaattaaaactgacatttccaaaacatatctaattagggttagcagctacgttgaccatagtctatggctaaaagaagtcagtccacaaattcaataaattgttgtaaagaaatggaactgtctttaacgtatatcactctcccatacagatggaatttatactcatgcaaattggcttagtagaaagtatacaagctttaatgccaggtcatacatttcccgtcctcagctttatcactcccagtcaatgggaccttgagcaaagccatctcacctctgatcctctgggccttcttccatcaaaatgtgctcatcctgcccacgtcacctggcttttgtgaagaatttagcaagataacggtgaaatgccaagcacacacactctatgttcaagaaacatcagctcccattttgtgcaacattttccagagctgtttagcttcttaaaaattccctttccctgcaaagcctctggtgttttccactacatccatcaatgccaacctctcgcccctggccatcctcatgtcctcctgctgttctcacatctgtggtctaagagaatacaagggtttcccttaaaaaaacatattcagatcctcccacagcctgtgtcctcacacatgggcaactgaataaataattcaaggccacccctggttttcctaactcctttatttttatctgtcttgcaaacacgtgttgactgggttgtttcagttatctgacaattggccatggtatattggaaatagtactggactgaaaaccaagaaacctgggtctgaagtctttgcgacctcatccattccctctgcctttggcctcagttttctgatgtgtaagccaaagatgttctaggctttctcaaccaaggttcctcttctaaattttaagacatggaaaatgatttgtgtaactatttcctcatttctcccaaagatggtatataataagtactattttagtttcataggagacaagttaattcattatatacaatggatgccttggagaaacactgtccaataggatttgctgcaataacggaaatattctatatcagtactaagattatagccattagccaactggggcttgaaatgtgactggtgtgactgaagaatcaaatttcaaattttatttatttttaattaaattaagtttaaatagccacatatggctaataggtgccatattggacagcacatacttagagctttaagctttaattttcatgaaacccaagtaagaaagatgagctctcccagctttggtatcctgcatgtctatgatttcattgtgtatgtttgtgtgtgtttatgtgtagatataggtatccatgaagacaatgtgaatgtgaaaggtaggaaacacatacaattcctagatgtgtaggacaggacatcatacatttgcttcagctggatgattatttgttcactcatccaagtatttattgggagcctgggatgtatcaagaattcactgaaactcaggtggctttatgtgtatcacccacaatgaaacatctaaagcacatagacgaaataatgaatgaccatcaaggtcagcatggttcctgaattcatcccagaacatttgtaaccccagtgtcagtctaaagccagtcatgtgactcaaagccactatgcgtggattgtggtcatcctaagggaatgcctccattagcagtgctgaggaagcctttctctccactcctacttttctgcatttgagtatatttgtataattgttattattgctactccaagagtaactcatgtatttaaaatatgtagaaaatttagaaaaccagaaagagtaataatagggggtgggatcaatcatcctatattccattgcccagaaattgctgctgataatattttgtttcatagtgttatttgaacattgagatattgctatagatttagctttggatgttactttttcatttaatattatagcttacacattttccatgaagttgcataatatttataaatatttctgcaataactgcttggcattccattaagcatattaaccatgggctatttaatgattctcttatcactgaatattaatattagtgtgcttgcaaaatttccacctacatatggtttcatatttacaatgataaggctgagaatgcaaaacctacaatttgaaggtctgcactaagttagccatgagtattagcacatgcctaagtgactggtatccatccatccatccatccatccatccatccatccatccatctatccatccatgcatacacccatccattcaactgcttatactgaccaacattataagataagttgtgtgctgtgctgtgtgaaataaaaagatggttattagatattgactttgtcctcaaggacctcacaatctattaggataaactctcctgcatgtcaaaaaaagttttcacagaggaaatgatgtcaaaggtgaacttgaaggaggagaaacatcagccaagtgaaaaaagtctgcagaggggatgtgggtaacatgacgcaacatgataggtagacagagcttatcatggagagaaacaaagctagagtgaagcagaggatagtatgaaagagcattgaataccacattatagggcattaggggataaaatcactgaaagaggtaagcagaggcatgacttgttcatcttgaggtttggggatgatctactgtccgctgtgtggaggaggaacggggagaaacagcacactctgatgctcacaagcacacggttcctgactgtgtgagcccagaggcatagtgaacgtccctgtgaggggaaagccataaggaaggcttcagacctggcttctccattgcatcctttcaggtagccaaagcacagaagttcttccaggaatgatgaaagagttatcatcaggaccattgcactttgagaaataatgggttgtgctgggacatttctcgacgtcttcccgagattttgtttccagtccctctgcagaggtcactcagatttgcagttttcagttcacaataagacaggagaagaggactcattcctctcccttctccacaactgcctcataaacagatgccaaatctggaaaatgagtaggatcccagagactctatagccaaaggaagattgaatccagatacacaagacccaacttggtaggggaagccatcataatattccacttctgggactggtcccattgagggattggctagccccttggaaagccgctacaatgaattagatggcatggtagagaaactgcttttgactgtaaaatcgaggagtgactcatccatccacagaatgtcaaggctggatggttctttaggcatcatttaatccagccctcttattttcagaagaaggaaccatgccatcttcatatttaatgcctaaaacacaagatggtgtctggcacatagtaggtacctgataaatattgtaaaaggagtaaactttgagaacgaaatggagcaagagattttctcataactacattgcaaatcctcagtggagctttatatgcctgataaaattaaaattattgcaggtggtgagacttcagcctgttgactttgtgctgctaaaagtcagagaaatgtatgcatcatcagaacagaagccacttaggctcaaacgaggttcttgctgggcaatggggaggcatttcacttacggttatttccagaagccttggcatatgtaggcaggaaagggggaaacacagatttgttgtgtcctctgccccattgactctggcctagtcccatcagttgctcattcaactgttcctaagtcggtgcattttccctctttccttggcctcctagagaattgggatcagcatgtcatctttgcctggaagggagaatcctggtgcagtatgcttccaacgcttcctccccaatgccctgcagcccatcaggacactggagccctcgtgaagcagaaggtaagccagccttctggaagctcattgacaggaggagtgtgcaaagaacagctctttcaatgtatatggggttttattatttttatgggtctttgccatgtatcatttcatttgagtaacatcatcctgcaaggttagtagtcaagcgctcatccatttgacaaatactttttgagcacttgcactatcctaacatgttgttctcatattacaaatgaggaaacaaagacaataagatattaaagaagtgcccaaggccacacacctgatacaaacacagtgtcttgggggtatttatatatccttcagaccccaactgcttgtagttacaaacaaggccactttagagtcaatacaaatattttggggcttcaaggcatcagtggtctttgattcttcttctgttatttcttagactatacagagcactttcacatgtgttgcaactattccttttaatttcttctatataccctctttttgggatctatttacctgtaagacacataaaggaagtgccttatgattgccactattatgggttccacccactatcagactcttccctgctcagggttgtctctcaggcttaccaaggaaccaatgatctctgtgctttcttacatcatcattgaaattaagagaagaataccttttgccaaatgcttgttgtcacactttgtcacttggcctcagaaccaggctggcagaggctccatactttcctcttagtctttcatctccccctccctggtactcagggatgtacacatagaccctgcccccacccagtccctcttgctcttctgcaggttagctcatgccagcagtcactgggtgaggacactattacaccagtgcatcagagggagcggaatcagtcttctcactgaacaccagtgagaactcctccgctatcctctatatttttagaaagaaggttgaaaagaaaaagccagagatagaataaagcaagggggaaggatcagagaggaaagtgaagttgaaaaacgacggcactgcactttattttttaaagtagcttaaaataaaaatgagagtcaaacttgggaagtctaaacaaatccatctggaatgtaaagcaagagggatgtctgggaaaagccctcagttcagcctcacagaatcacaggctgtcagacctgagagggatgcctggggtcatctggcccgggctccccccaagtgcaggaatcccctctatgtgcatcctcactgaggttccctggagcctgttcaagctccagttttttaggaagttctcgaaatctgcaattgtaatttttccacccaaactgaacccactttgggttgtcacagagaatgtgtgtctctgccacctgacaacattttgcatgcttgtatctagtgagcctgtctcactagtgaccaacacaggcactatatgctgggcactgtcttgggcacatgggcaaggcagtgctgagtgtctgctagggaagtcagataagtaaatggccaattaccattcaatgtgaacaggcttatggtaatagaagtaccaagtggtgctgggggcccataagaaggggaccccatgcagaactggagactcagtcttcccatgaaatatcacaacactattaacgaggtgcatctgagaatgtgaaaaagtttggtatgttcacagagtggctgttttctaaatctacttcagaggcttatagggttcctggagacgtttatagggtatcctcaaagtcaaaagtattttcatacaattacatatgacatcatttgctttttccactctcattctctcctgagagtccagtggagctatctgatagacacatgacatgtgatgtcatttgtgctctgatagctaatggagcacactcttctgtattcttgaatttttaaatttcttagctttagtttataaagcggaaactactaatagatataacctgcataagcaaaagttcagtaaggctataagagtttaagtaggttcagaacatgtaaaacaaggtagaggtggcagaggtaagacagatgagatagataatggccaggtgaggacgggtttggattcacagcaagggcagtgagaaaaccatgtgctttatgagggcatgatatatggtaagacctgcatgtcataaagattgctcagactgctgtgtgaagaagagatcaagaggatttggttgctagaggaagggaagcagcaaggtgactgttgccaaaatccagctgaggaatgatggtgggctggtgaggtcggtggctgtgagaatggagagaagtttatggggttgagaggtacttggaaggtagaattagcaagattctcccctgagatgtctctggctaaaattatcttgctttgttctaccacttgtttgaataaaattatttccagacatctccccacacttacatccaatgcaactattagttggtgaagtttgctcctagtttgttcctgaccttcttaaagcatgatatgcagaatggagttcaactggaggcactgaggtctctggttccctgagccaattcggagctccaaggaaacccagcagccttgggttttcctcctatgtaaatttagtacatgtgcaccaggaaaagacactgttctttttttagagcatcctattacagtctctgtgatccttttggctcagacccttttaatatccttgaagaaataaacttttccatgagccaaactctgcaatttatttctcaactcattctcatcctatttatcttcacatgtttaagtttttggacttcccaaactaacttaaaactcccaaattcatgagcaatgccagacatatctgtatggttggggaaaaaacatggggaatgcaggggagggaaaggaggaggattggaccatggtctcagccctactattgatgtactctgtgcccttgagtgagtcacatagcttctctgaaaatggcattgtatccacagaatgaaaagttgaaatataatatcctttctagctctaatattgcatggagctgtaacttcttttcatataatcccatattaactagcagaagattcttcatttaacaaatctttattggaaatctactgcatttcattagcttcatttctaagaaggtaaatacagtcatagaactgcttgcctttgttcatagacagtggttgcactcctaccccttgagcaaaaactgtatttcatacatgaatatttttgagatatttgacgccatgttttatctgtagcctataaattagataaatatatatttcttgatctgactgactcaaatcccagttaagatcacttatgcaagtataaaatagatcccaagtgttgggttttccatgagagattagcacatggcactaactgtttttattttttctcatttgtgtgttttctctatttttctgcccagaatatttcaggtgtgcttaactattcacctggaaaaaagcttggcaccaagtttttataactatatttgtgtcaacagctgcagtgtatatatatatagatatataacgggtgcctgtatagtgcttcacaaaagtaaatatagatcagcatgattatgtataaatatatgtctatacacatatatgaccttatttctagtggacagtttatataaacatgtaatttttaatttaatcactgtatatacaaaaggatatctattaataatgaagtaacagggcttttacacttagttctcttttcttctttgtttattcttttctccccttccacctttcctcctcccccttccttatcttcttccttcccttctcgctttgtttcttttcttcagctcctgtccttaccttccgactacatgtccaatcaatctcccagctgtgttcacttttcctccttaggaattctgacttgccatctccttgcatgctttcttgcagttcatatattgtctgcgttagtccaatactctcctaactagtcttgcaagactaaaagctccctgagaacagagatcatgttggcaagcttattctcttggagcctagcctacctctggacacacctggcactgaatagttactctttgaatgcatggaatgaatgggcggatggatggatggatggatggatggatggatggatggatggatggatggatggatggatagtgtctgtgtctctaaacagtggtttttcttttcttttctttttcttttttttttttgagatggagtttcactattgttgcccaggctggagtgcagtggcgtaatctcggctcactgcaacctcagcctcacgggttcaagtaactctcctgcctcagcctcctgagcagctggggttacaggcacgtgccaccacaccgaggtaattttgtatttttaatagagatgaccatgtaggtcaggctggtctcgaactcctgacctcaagtgatctgcctgcctaggcctcccaaagtgctgggattacaggcatgagccaccgcacctggccaacagtggtttttctaaaaggcgaccctgatgtcactcatttgcttaaaatttctcagtagctcttcgtctatttcagtgtaaagttcagtttcctccttaatgtagtatacaagccacttcacaatcttggttctacttagcttaccagcctcagcatttgttgctctacaattgcacttgaaaaccatagtaaccttaacttacactctctcccaactattctcatgcttggaatacctcctcttaccaatattttccttgttaatacgtccctactttccaggacagagctaatatatttatgggaatctattaatgatctcatcctatttgaggtttacagcaaccttgaggtaggtaacattacagtaggtaacacaatgagaaaccctataactgatattttaacccaactttcattccttcaaagcctggcacgctgcctggaccaacaatatcatattctactccctgccagggaatttctgaaccatctgagtctcagtttcctcttctgtaaaatgaatttcataagacctgcgtcacagacttagtgccaacgtaaaaagacctgaggcgtgtaatgtgcttggcacagtgcctgcacattgaggatggtcaactcgtgaaggctggcattattaatgaggttgctgctttggttatggttacacttggtgcctctagggactcttttttacatctaagggtttgtctctaataaccagacaaccacaagctttgctaagatttctactcctgtttacttgcttgagcataatgaccagactcaccttcctgtcctttggaagtatttggtccctctgttgattaacaagaaactagggaggaaggatgagccaggcagatttgtcatctttgctctcctgtggcttcccacccctgacagtcattttctccaaggaagggaggaagattacatcatcccttgccagttgcaggagaaagcccatggaggggtggaatgttcacctggcacccaccatcaggaagcatgctttaatgttctatgctgtaacttttaactcaatgttaacaggctagaaggttaacaaatatttatttagcatctgctatgtgaatactctatggactaggcacactgtattaagcaaaagctacatggcgttgagcgaagcagtgctctttaatagagacaaaatgacaacgatcttacaggattttgatgacaatcagatgagttaactaataactaggagatgtgtttcatatactgtaaagtgctgccttcaatgaagttgactgaatgaataagtgatacatgtgtgtcaacatcccacaaagttaagaaagtcaggaactcagtgtgtgggaaagtagacaagaagaaaggcttcagctaggtggggagtcctacttgtgttttacaccctaaactaaaggttgctttgagccagcagttactgcaaataatgaatgaaactagccaaggagagatagaggaaatcttgtaattaaatccatcttttcttgctgtgatgcattatatctaagaagcctctgtgtattttctcacccctccttctcttttcctcttctcttctccatctccacttggtggcttctttctttccttggctaagcagaggcaaggaggttagaggcatttacagccttcactggcatagttttttcactccaaataactttctagtattgacattatagtgattcctgttaccctgtaacattaccacaaagcgtttttaagcaaagatcttttttttttcttatttgcttcagaaatgtctagggtcaccaccaccctcccaaccaaccactgaggctgaagaaaaaaaaagaatgtggctaggtgggcatggggacacatgcctatattcagctactcaggaggctgaggcaggggaatttgagcctgcaatgagctacaatcagaccattccactgcagcctaggcaacagagcaggactctgtctcttaatttttttttaaggtgtctagttgggcaacttgaggtccttcatcttaccatccggtctgtctctctcatgaggctcccttaaacaaattagagccaatcactacattgagtcctggttattttcctcagtagtgcaaggaagagctctctgggagtctagatgtgatctcagcagagaaaaattcagaagtcgctgcaggctgagatcagtggggatgaggcatcatctccctagggaaagaggagaagaaaccctccttccttctccccgctcctcacccaaccctccccttcctgagtgagacagaacagagtgcggagaagctcagtggtatggaatgactgcatgtagagaaggggaggaggagagataagagggctccaaggctgccttccagctctgttgttcatggttctagacagtttcctcccaggtcctcagtctgcagggtggatgctatttatgctcacctattctttgctggtcggggggtggggttaggatttctgtcagtccaagtaggttttaccaatggcagtaataccacaaggattctaatttattctactgtcccctgcatccaatagggagaacagcaaagaatacagattccaaaatgaaacaaaactcggttccaatgctggcttttacacttcaagttgtatgaacctgatcgattcactctatatttgggagccttagttttatcacctcctaaataagtccttgcaagaattaaagttcaggggacacagtgggtgtttagccaatatgtaccctttacttcttttcatcttaggcagcacagcctcctaagtggaagatgaggaaggaaagtttgaacattgactcggtagtgagatgaaagcagtttgactgaatgtctggtgattcctctgaaatctgtattgcaggggtggggatgagatggatgctgtgtgtatagcagattcaccaaggcaccaagaaccttcctctccttttcccctctgtctaagttctagtcagaccaatttctcctggggtccacaggaaactctaaggatgggaataaagctctttccccaagaactcattccctcatctcttctgcataggtcatcctgatgttgaacagccctgtaagtccagtgtccgcacctggagcccaaattcagctgtcaacccacacacggttcctccagcctgccctgagcctcaaggctgctacctcgagctggagttcctctaccccttggtccctgagtctctgaccatttgggtgacctttgtctccactgactgggactctagtggagctgtcaatgacatcaaactgttggctgtcagtgggaagaacatctccctgggtcctcagaatgtcttctgtgatgtcccactgaccatcagactctgggacgtgggcgaggaggtgtatggcatccaaatctacacgctggatgagcacctggagatcgatgctgccatgttgacctccactgcagacaccccactctgtctacagtgtaagcccctgaagtataaggtggtccgggaccctcctctccagatggatgtggcctccatcctacatctcaataggaaattcgtagacatgtaagtgcattctctgaatagggagtttattaagtgggtgggttgtggaggaacgtgaggtgggtcagagaggcctggacagggggaaggttcatcacagtcaagactcactctatggattgtaacccatcattgggtgtagatttgtcttaacatggcagagttgatatcatgggaagagcaatagggaaggaaccattagacctggatttagtgacaaatctgatgtgtgaccttaagcctcataagcctttcttaatcttagtcattccaatagtaaatgaaggaggttggatgagagtagcagtgagaaaatcatttattactaatgaaagtagaagaactgaagtttgctaatgattttctttttatattaaattgaagacaatttatgcattttgattgctttttcagtgggtgaatcgggggtgaagttatagtagattgggtgggggttgggcacagtcctaggtatttgcacaaaaattgtgctggaaagtgaatatcaactttaacagcacttgtttttgtcttatttcctgaggcagaacagtggttcaaacccatttgatccttagggcctttgcagctttaggtttccgtaactctttctggatgctcactgctcttatgtgaagtagtacttgtctttcatactcacttcccggccagggaggtggctcactcctgtaatctcagcactttgggaggccgaggcaggcgggtcacctgaggtcaggagtttaagaccagcctggctaacatggtgaaaccccgtctctactaataatacaaaaaaattagctgggtgtggtgatgaacacctgtaatcccagctactcaggaggctgaggcaggagaatctcttgaatccaggaggcggggttgcagtgaaccgagatcatgccattgcactccagcctcggccacaagagtgaaactccatctcaaaaaaaaaaaaaaaaaaaattactcacttctcaagccacctctctattacttcttccccaaacatcctcagaatttctgtcttaggaggaagaccatcttataatgaagccattagtgcttttcctgtgtactagaaaatgggctaaggtctttgcatcttttactcattccatcctctccacaaccatagccctattattcttattttacaaagaagaaaactggggcttagagatgtgaagtcacttgtccaagatcacacagttaggaagcggtgaaggtaaggattggaatttcgttctgactcctaagccactgcactcaactggtgctcaattaaagatgtgattccaacttctgttttaatctacaaaaaggatagagtcttcgccatctaacttgggtgtcaatggtttctataggccttttgtggctctttatttggttctaaaatgatgtaagacaatctctgctctgtctacttgaaaatattcactaagccaatcattaatgggaaccaagttctagaggaaacttttaatctttttaaagggcagaaccactttcaaacactttaccagcacttccttttacatactagcaattaatgtgcacatcacaggcaaactcttgctaattcattgaatcagagatgaggaacagctgtttaagaactcagaaagagcacttggtttgtgtttgagaatgtacttaaaatttaaaggatagtcttgccttaaaaatattccataaccctgtctcttccatctcctcacttgtctagagtggtagagttctataaatatgcttccacttaaactttctttataaaacaatggagggaagaaataatagatgttttaaaatctcagtttaaactcagctttcctttttttgcctcgagttacgagcctatgagagctgccatgggttgataagtttgaaatggtgaaaattaaactgaataaatgaaagaacccttagtgatttagcttagttctattctcagcaaaatctcagctaaatcactaactggctctaccctcttaggtgagtcacttgtcctttctagtcttccgatgcctcaactttgcatgcaggaggttgcactggattaattcttctctctctctttttttttttttctttccaagacagtcttgcactcttgcccaggttggagtgcagtggtgtgatcttggctcgctgcaacctccaccccccaggtataagcaattctcctgcctcagcctcctgagtagctgggattacaggcacgcaccaccacgctgggctaatttttgtgtttttagtagagacggggttttgccaggttggccaggctggtctgagaactcctgacctcatgatctgcctacctcagcctcccaaagtgctgggattacaggcatgagccactgcacctggctagttcttctcaatttggattgcacatttaaaaactgggacatttaaaaattgcctgggtctcacttgtatcccatctccactctcccccgagatatttatttaatggttaagaataaggcctgaccattagaacttttaaaatctcataaggtgattataatttgcaacaagtttaaacaagtttaaaaaccagtgcacttaaacaagttctcaaagtgtggccccagaccaatggcatcagtatcacctgggaactgagaaaggccaggctctcaggccccagtccagcctagtgaatcagaaactctgagtgcagggcctctccaggtaatttggatgctagttaaagtttaatagccactgctctaaattatctccaaggccaggaatctccaaattctctttcactcatgcaactacttgctcaactcacaaatatgtaatgagaacattctatatgccagattctgtactggaaacagtattaggatgactcagaccagtccctttcttgaaggcactcaaacttaagtgctgagctcctacccactttgtaaaagtgccacgtactgtgccaaatcatcagtagtgaggtcgacactcttatgcacaatttgttctttcattcactctccaaatatttctttagtccctactatgtgtcaagcacaagggctagactgaggctttcatcggccttcctcttcgaatcttttgtgtttcaaggagtttattggagatctgggctgggatgggctgggcttcctgacctgaatgttctctgagactgaaaaaagagaaacacatccttccaaatcaacctaccatttcaactcctttatctcttggtaatttgagtcctgaaccccaccacaaatacctctttgtgtgtatatgtgtgtgtatgtgtattttgctgctttcacattttttccatatcaaataaattggctcttatacaagttctatataaagactgttttggagaaaaagaggagagggaaaaaatgctttctttttctttcctgactcaacccattacatgattccctttgacctttgtcttcattttttttctctcaacaaaaatatttattctttctgttatctacactggagatagtttcccaaggtatgacagtgatgaagagagagccttctgtgcttaccccatggaaacttctagtagactgattacttttggccaggaccagaaagaaatgtggaacatctccatctcccttaagtggaaacccctctatcgaatgagaaatgacactatcagaagaaagggtaccagtgccaactctgctacaaactcaccatatgacacaaagacacaccgcatcacctatttggacctcagtttccatatctgtacaatgagaggccaacacattaagcccttctctatgggtagacatagagaaggtgtctggggtaacaggtgattcacatacttttttgtagtaaaaggaattcaatagggattatctgtaagaatcagtacccagaggaaacctcactggctctgtatgccctactgaaatgtggaccacaataatgacaaccatttactaagtatttcctctgctttaagtgccttacaaacacttctgaggtaggtgaaaaagcttaaattcagagagtaattaaactaacctcatacagctagtaatgacatagacaggcctcaaacttaagtctaattccaaattccaccttcctaaccactacccatactacttcctactacaataatgtaaaggcagaattttagagctgagaaatgcatccaatctggccaaagctctaaatatagcaaggggaagacaggcttacaagtcagaggccactagtccacaatcagtccctgtggcccacccttgatgtcttggtgtccaataacacaaattacacagacagttctttatgcttctggctgggaagaaatagcagggaagcatctttttctccacttggctgtcaagtgcttctacactgagcactgtgctccttggcctatatggaatcttcagatttctccaagaagtaaatactctggacaaaactgagaaagcaaagtataaagcaaaccaggaacagtgaacagtagctcactctcatctacttattggtctgtctcattcatccatcacttcatgcaacaaatattcactgggtatctattaggtgctatgcactattttaagaaatggtgatccagtggtgctgaaaactcaaggtgctcacagtctatgggaaaagagagggacaggcaagcagtgtcattgcagtataataatattctgatggaagaaacagaaacacagagtcagaggtttctaacccaaacttggatgaattgaagtctaaacttagaactagaatataaactccccgagggctagatttttttcctgtttttctcctggtgcattccaagcacgtagaacaattatagacacaaggtaagcactgagaaaatgttctttaaatggttctggaatgaagaatgagaaggaatttagcatttgaagagaaatggagaagccaaaatgtagtaagcttgtactatgtgtcaagcactaactagggactttacatagataatctcatttgatctaatcatcccaacaaccccacaatgtaggtggtcctatccccagattatatatagggactggaaactcagagaaggaatgtggattatagtttacagctatcaaggggcaaagctggggtctgtaagtagatctgtcaactccaaagctaatgctcttgatcattcattctctgattgaacaagtatgtttgtttatgcctctgtcttcttaggatcctcagttgagagctagaaatattcttaaaagtcatctctctcaactggcttatttgtgtatcccaatttagtcatctattaattcttctctcacattcagacctgtaaagcttccaacacaatctatatctattttatctcacctccttggcattctcaatataattctttggggaaatgaatagacataaggaaaggagatgtttatatgatctgggtggacattcttgtgagtccaaattttacaaatcagatccaaatttttgcctctgaactccaaatgctttgaatacccatcaattagaaactttagtgcattcattaattcacttgctcagcaagtatttgttgacttccaacatgagcttaactactttctaacctctagggattcaataatgaatacagcaagaaaaactttttgtttcattgattattatcctgtagttgggagagataaaagaagcatgttattatataatatcccagttggaaaagatttagtgatttttagataggtggtcaggaaagtcctctctgatgagatgacatttgaacagaaaccagaagtgtcccccagtaacttataatgaaagctagctgagctgccatccctgggatcccagcctgtttggaatatgaatttcttataacatgatccttagtccttgatcacagtttgtgttgtattatatttaacagtgcttgtggtttttccttcacctggttcatattcttaagtacaaaatttatgacacttaaatgacacaataggggctccatggatacttgttgatcatgtgaagaataagtcagcagtagcacaaagtgggctctaagaagatgcgtctcttgctttcagatcttagttataacattgatatgtaatgtcatattaagcctcagaggatttggaaagtttaccccaaatcagggtcaggtgaaggcacaggtggctcttacatgctgtttctatggctcttgagctgagtcaccactttctttcttcctttttttttcctaagcctcatttctttttatagctctttccgtttctcaccttgtcatccatcctttgttcttgtatgtattaatttattcattcattcatccatcaactagtgaaaatctaatataatccatgttaagtaatacttgtcccatttaacaaatatttattaaatatctattctgtgctacgaatgcagccctgattaatacagacatgatctctggcctcatgagcacatggttctaaatgaaaaatattatactgcagcatgaaaagtgttatggtgtgaggagcacggggggcaggggggctgtgagaaaacatgggaagggtgtctaactgagcttgaataggtaaggagggcttcttggaagaagtgacatgtaagctgagacttgaaggatgcataacagctgatcattgaagaagttcaccacagttcaaatggttgaaactaagtggatgttcagccaagattgataaatgaatgaaagaataaatgaagggaggaaggaacaagcatactgcatgtcagaagggcatactcaaccacagatcaaatgtacagctttgagatggaaattgtattaatttgggatatctatctacttcaattcttagatatacttcaatctttttagctgctgtacagtatcccacagtatgaatgtgctgcaggtaatttagccatacccttaatggtgggcatttaggtcacttcacacatttttctgctgcaagcaaatgttgcagtgagcattctcgtacaaacatccttgcaggcacatacatgcaagcattttgctagggtgaatactgagaaattgccggtgataagctatgggcctttttcattttaatggacacaactatgacattctgggcaggtgaactagcttccaccccactagcagtgtgtgccaagacctgctattttgtatcatgactgcttattatttggcataatgaaagtgttttttctttgcacttttttacccactttgatgggaaaaatatgacttctcattgacatttctgttatgtgctcttaagtaagcatctactcaaatacatttactggataattgcatttcctgttctatgacttgtctattcatatccttaagatgggcctcatctttaatctccttcacacctctatttctcattcgttaaattgggatttcaatgtcagccctattgcatgtccattaatgttatcagaatccagggtgaaataggaagttaagagggaaatagcatttatgcagaagttactctgattcttcttttatgtattgatatatttatcaaatgctgatttagtacaatccctgtgctaagaaccatgacacattctgaagatacaataggtaacaaaaaccagcccggtttctgctctcagcagggcttaaatttagtcactgtgttaaccatcttcacattgctaatatgatttgtagcatttactactggtagcactaacattactgctaacaataactaccatctagtgaaaacttcatatatgctcagtacttttttataagtctaccaatggtgtttaggtattagcatgcctgacttcttagatggagaagctcagactataagagataaggtcattgatttaaggtcccccagttaatagatgctaaagccaagttttatatccctttgcctgaccccaaagggtgtgcctggcaagatacagagcacagtcattgtcataatgactgacaaaggacaagatggtatcttgatcgatggagaaaatgaatactaaaattagatcttcttatttccaaaagcaatagaataaacaccaaagagaggagaaagcaaaatttttttattgtttttttgaacatttaagcagatgaggaggaggaggcttaggaagtgtggacatggccaaaccagcatgatttccagtaacctgttgctgaaatgcatgattcaggctggaccccttcctgagcagggccttctcccacgcctgcccagcatggttttgcctacattctgatgtcccacccaccagaagagatgagcagcatcagtatagagagttgtttttccaagcccagaatgaataccactgctcttagctcaggccaggggagcacatagtcagcacaatctcactctggttctggaaaccaggcattatccacctatgactccctctcatcagtcttggccaagtatttctcagaatgaaatatgggttctgggaatattaggataagcaaaagggcttaacaaaatcaactgatctccagggtcattaacagccatagaagtgctatctccaagtgccttctcaattttgaaagggtgaagggctcctgtttggtgctaataccaccaaaattgcttatataaacttttatagattactctaatgcactactaaactttgtagtaagtgaaccattataggttctcttctacagatgggcaaactgagacccatagaagttaaaaattgaaccgatagttccattgataaatttattcatttgtttgtttctacatttattcactcgtgcatttaataggagtgcctactgcatgtcaatctttgtactgggagtgtaactctgaatcttataatctggtaggagagctgaataatagtacacacaaaattataattacaaactgaagagtattatttcaagaggttataatagagtatacatcccccttaaattaagagagagtctgtagaagatgagtaaagagataagaaggagccagactattataaaaagataaaaaataacagatgttggtaagggtgtggagaaaagggaacccttatacacttctgatgaaaatgtaaattagtacaacctctatggaaaagagcatggagatttttcaaagaactacaaatagaactactgtttgatccagcaatcccactcctgggtatctacccaaaagaagataaatcattagaaagatacctgcacccatatgtttatcacagcactgttcacaattgcaaagatatggaatcaacctaagcatccatcaatggatgatgggataaagaaaacgaggtatatgtacacaatggaatgttactcagccattaaaaggagtggaatcttgtcgtttgaagcagcatgggtggcactggaggctattatcttaagtaaaacatctcagacatagacaaatacctcatattctcacttagaagtgggagctaaataatgtgtacacatagacatagagtatggagtgacagacaatatggacactcagaagggtgggggaatggaagggggtggatgatgggcaattacttaaggggcacaatgtacattattcagaccgtagataccccccaaaccctgaattcactctgccatctatgcatgtaataaaattatatttgtaccccataaatttatacaaataaaaaaagaaggggccagattatgaagagtttgtggctcatgttgagtttagatttattcattatgaaatagagggactaaaccaatcaggtctgagattttacaatactgccctggtattctgtgaagaaaggattgaggaagggtgagtgaatccatttagggttgactgctgaagtccaaaccaaagatgatgattatttgcatagaaaagtgaatgaattggaggtatgttttaaaggtagaaccaacaggacttggtgatagattggattcaagcagtttagtaagaagtagctgtttaatgattctccaacttctggtttgaatatctggaatgagggaaacgttatttcctgaaatagaggaatatattttaatttattgttttgttgggcatggggtagatcaagagttcagtcttagacatattgtgtttgagactcccatgagtcgtaagagaggaaatgctaagaaggctgttaaacacgtaggactgaaattgctcatggctgaactggaactattgccacccatgtctacttacaacatggtaagaaacctctccgcaaagtaacagaatctttttccataaccataaaattactatctcatccaccatattttctatcccacttatctttcagaatcattaaaaataatctgctcaatcctgatgccatccaaatagaaagaaagcaatattctatatggaaaattgtgtgtagttaacataacccttcctggtttagaatgattttaaaaggctttgagaaggtgttttaaatgtgtatttgaatgaattatccaaaatgcattaggcctgttccccatataatgataggaaaaatgtaataggtctttacaatggacctgacacacttcccattaatatataatctcaaacagatatcctaatgtcctcaacagatttttcccccattctataaaagatgctcagataaactatgtaacgggcccacatacacccagctggtaaaataatgggtttgatgactctaagctaggactatttgtgttattatacaagtgtaataattatatccatcatttattggctatgtacaaggcattgtgctaagtgctttaaaaaatttttcttatttaatccttttaaaaaattctttgagcttttattattagttccactttacagctgagaaaactaatgtttaaggacattaagaaacttccctctggaagagttagaggtgagattcttagccacttcaaccttgtgcctcttataaacatgcatgaataaacttgagtggaaagaaacttcctggcatgcaagactattggttagaattgagatgtttctcctcagaaatgatcagagtctagacattgaagtcaagtttgctaaaaagcaaggttatagatagaaaagaaaatgaaggccaaatgcggtggctcatgcctgtaatcccaacaatttgggaggctgaggtgggaggactgcttgagccaaagagttcaagaccagcctggacagcatagaaagaccccatcttgacaaaataacaataataataatttagtcaggtatagtgatgtgcacctgtggttccagttactcaggagggtgagggaggaggatcacttgaggctgggagggaaaggctgcagtggtgagccatgattgtaccactgcactccagcttgggcaacagagtgagaccctgtctccaagaataaaaaaaagagagagagaaaataaatgttgttaccttggggaaggagatgatgggtcttgatcatccagctgcaccacattgatagaggaaatgtgtctatatctctcagcagaaaaacaaacagagcaattgttatatgtccaaatatttctatagatgtctatggattaatagtttcatgacatattaatatcaattctgagagggaaaaagaggtctgtgtgtatgcaaggaatgctagtttcaactctattcaggaggtcttgttctgcagaacttcacagaacatgctacttttccttttaattgtgaggctcccagaggttgctgaaatgctttatgtagtctattctgacattgtttgaaaaaggtaccctgttttcttatcacatatcatatgactagcgttactgaggaagctcctttggaaaatgatgagttagtgaaatcaggttgcaatgtgtgtcctggtgtcacctactactttgttattttctgttcactctgggggtaggtaggatggactagacttggttgtgctgctccaattcctgatttttaagaaaacaaataaatgaagaggaaagagaaggaaaataacagctgtcagagcaattacagatgtgagaagaatggaggaatttatctcacactgggcattggcaagaggaatggacaaaatctattcagtctgtgcttggagacactgagaatcatgagggcaggtcttggtgggtttatgttgtgtctgttaaaacacaacctcagacaccactttagagatgctgaatttggaatcaagagatctgactcccacaccagcaccagccttgctgtggaacagctttcttccattgtttaagcttaagttccttcccttggacaaagtgggtgactgtccatatagtctaacaaggagtggtgggaaaaactgataagataatagacttgcaagaacatgatgcaatctagtgaactgtaaagatttaaatgttcatgattctttctattgtttgatttttcactacgcttgttcttggccagagccatgatagagagtatgtgtaaaaggcaaacactctgacacatacagacacacacacatcaagcagtttcccgtaaactctaccaggagttgctatgcttcagtgttgggttagaagaaggaaaagataaattgtactttaacctttgtaactgagctaaagaaaaaataagagagaaaacacaccatgtgctggccctggatcaggagacctggattctagtactggtatcctgaaattttgttgtgtccttgatcaggtgggtccccaactgtgggcccaagacccctgtctataaaataaaggggtaggtcatagctctgaaattctgttcagattatcctttagctctcacctgcactcagtgcatctaattaagtaaagacggaggcagcaggttacatgtcatgttgttagtaagtctgaactttgagtttgggggctggccatctagatctaaagaaagcctccaggcacagtgggactctcaggactccacctagacccagcctctctcttaggacttacaaagctcttcctttgagacaatttcaaaatgttttggtgcatttttcctggatggcattttaacttgacactgagatattagaggtgggggctgtgtaatatctgccatgttattctctacccctagcttcttgtgcaaggccagacatcatgtagatggtcaataaatacagataaataaatgcatgcatgcatgaataaatggatcagtaaaccctgtggtacatcaataagtggtcagaaaatcatgataatacacatcatatctggtatattgaaggtctttcttttaacttctaaggtggattagttactagaggattgaaaggacaaatgagaatcttacagcatggtcactgctcctcttggggcctcagctctcttatccttaaagcaaaggcattgggccagaaggtgtaattctgtgtttcattcattcaacaggcaattatttagcactgtctgtgtaacaggtcctatagtaggcagtgaagataaaccagtcagtaagggacatactagcctttcaggagcttagtctacttaatgtgaaagtaaacacataaacaagtgatatctaacagtgcaaaagctattatgtaaagggaagcacatgggctaagagctcctcactcagcttcacaggttagtgagaatctcctgaaagaggcagcaactaagccaaggcaagaaaatttagccagggaaggaaagtgagactgcttgctcagggtggtggctgagggtaaaatttcaagaagagagtttgagcaaagaggccagagaagttgacaggggttagatcatgatgatcccagagttcattgctgtaaggtctggacttcatcctgagagtggtgatgagccattgagtgtctgtaaggtaagagaagatcttcattagatttggttttaggacatctttttggctgtgtgtgtatgtctggatagaagtaaggatggaggcatagatcaaaatggtaaacgaggaaaagcaatgttgccaaaactgaagtagatgatggcacttgtctatggtggtcaagtggaaatgcagagcaccgggtggggctgagggatattaatgggataaaatacttggaaaactaatcaaaaggaggaggcaggtgagtgtgttatgaaagatgcctgtgttactggcatcactgaaacacacaatgaatgcagctatagaggcatatttgggttgggatgaaacaaggagaaggagttcaaaagtgccttccagttgctggcctgtgaatcagaggcaggcatacagggcagttcaccttcagccacaacatttctttcctatgcagagatgcaggagcaattgaggcatacatatgcatgtttgtatgcatgtgtgtgtgtgcatgtacatgcatgcatgagtacctgcatatgtgtgtgtgtgtgtgtgtgtgtgtgtgtgtgtgtgtgtttggagcaggcaaacaaagacctgtgagaccacctgttttcatcatctgctgattctcaaagtgtagtccaatgttctaaagaggtcccatggggtatcgggggttaatcttccatagaactaatacctataacgttacaaggctcaggctttgttttctacccaggattaatcattcactcatgggctttaatacaagccagacacaacctcactgtgcaaagcaatgccagctccccttccattctgatgctagcttttacattcttgttgtcagagtgggaactaggtttttgccccagtttcagaatcctatgaagtgaaaagtttagaaacttccatccaaggatgttagtcaaaaatgccaggacagctggactcagccattaatttgccatatgacttgcggccatttatttcccatatctgggctttagtatccatcccacaatgagaaacttggagtaagtgatattcaaagtcatccagctctgatttctacatatttgtgtttccttcttgagctaagctctgtgtatacgaagtcagtctccaaaaattttaagcagagaattttgagatgcttgaacttcttactgtctgggaattagactgaaaaactctcagaccaggaaagattattgaagatcatctatgccaggactgacacttgacatatgagagaattgagctgaaagaggaagccacttcttcagagtcacacagccattcaatggcagaacagagaattgaacttagcgctcctaattcccagtccaggtgtttcttcccctatgtaacagagtgttggacattggccagaccttgggactcacatttgaactcagctccctctgatcatagagaagtctcccttgtttgctgggaatgaaatcttagagagctgacatagtaacgtcatggcagctggtgccggtgatggggttggtataggaaatgagagaacacatttggctaagctcagggttcatgtgaccctccaagagtcttaatttcaaaacaaactcaaccttttaggttcaagttctctctctcatcagaaatgtgacttcctgcttctaagaagcaaggcttacaaaagagctcagaagacttcgtggacatcaaatagctcttacaaaatagcgttttgatgagttaagtgtaaatgaatcagaaacataaggattacattttccccaagtgcacatgggtttcagaattgaggggaaatgtagtttgctaactgcacgctggttttcatggaactcaagccactcctgggaagggtaaggggagagaagaaagagaagcccagtccccaaatggttttagatgtggtgccaaattcgaaaatgctgttgggtttgccctctgccagtaataaaattgctggccacccagagaggccacagggaggagaaaggagatggctttccttactggcccctagtcctccacaactgtgttcagttagtgccgctcaatcaccagctgtcactggggccctccgttggactccctggccctgacttggcctcgattttcacactctgcagcatgcctgtttacctccaactgtatctggtgttttggctcccagagtccttggtgactggtcagcttgtcacaagcccctgctctgtaatcaagtgacctgtccatcaccagtagaatgtttggggaagctgtcacacatcgcctttggttgcattcaggaaaaaaacaagagttctttgtagatcttttcctctctcccttctttaatgctatccaggtgtggagtttcctccaaactgttaaatgtcttcccttcaaatctcagtctgacacaaattaccagttaaatctcaggaccgctgttacctcgtcccgggattcgaagctctggatcttttataatttccacattgtccctccattctttcccttctattttgttttattgcaccaagaaagtagaaaatcatttcaattggtggtaaaagatgattaaaacaaaataacaaaggccttggctgcaaactgttagttttattaaattggctactgtgttttaaattagtaccagggcaaatctttggacaattatatcaaagattgctggaattaatcagtcacatgtacacaattgctcctttcagagccttgtacagagtaaggatgtcgttgccagtaggaaaagaatgagttttgcattacctgtgtgagagggatggaccctagccccattgagaaggaatccaaatgcccaatggagtctcagatctctgtcatctcatttttcatttatttaatccagacaatgggttggagctcacagtgaccaccaggagaaataagaaaatggatgttacagggcaaaaggccattttcccaaagattttttcttggcactgagtcctcagcatgacagctttgctttaataagggggcacctgaagtggaagggctgcagtctactgagtagctgggtccagaaagagggaagatgggtgtggtgggatcccaggctatacaaagactggaggcagattcagtatctcaactacccttagcacatctaagttctgacttctacagctggagataggctggaggcttggagaattattgcattcagttccttgcgtttacaacagtgattctccgtcacttgatgattcaagccccaacatctcacctcagagcctcctgccatctactgctcactccacccaaccattttagcgaaacgtttccacttcctttggtataccgtgaatttcagtctaaatgaactgttcttaatctagaaaaatttacctctgtcttgttttatgctgtttctactgctcagagcactatacttatcactcacattttttgatatgtgtgctttctcaaactattaattcattcaacagatattgctgagaacttattctgtgctaggcactgcaccaggcacagagatacagcaaggaagggctaatattctctgtccttgaagcacttaacatacaccaaggtagtcaggcattcaacatgtgattgcaaaatgtgtgctcacttttgtaataaagtatgggacactaaggatacctgtggaaggaaaccaacataacccagctatcaaaaaaaaaagcctccctaagcctttctcgttctttaaaccactatttggtcttcctctgctagcactctccaaactctactttgtgttacaatcacactctacttggtttatcctctcttttgccctttgaactgtttgaaaccaatggcagtatcttcttcatctttgagtcctccattttgactgagcttcatacatttttttaaaaaattgaacaataaaagtgatgtccagagaaaaatagctgattgggccacaatcacaacaaaaactaataaaacagtagccatttttttctgatacttggtccacagtcagtatgttaaactatctttcaaaacatttcttcccaagggcatacaatactttctgtctcagatccttaccaaccacccctcaccaccaataaaaagtgagaccaaagtacctctcagtcaacagaaataaaaggtttccttaaaaattcagagtaatactcagacaaaattggaattaaggcatacatagtcatcactcagtggaaaaaactgtgtgtatataactttaatatgtgaatattaagaaataaattcttttgagaagactaatcacagctccaacgccattcagtaaagaaggacattttgtaagttttagttattgttaaataaaatagaatataaaaatatctagcatactaccaaaattttctaggtactcaatttattccatcctacagggaatatttggtctctttgccttcaggtactgccttttcaactttccttccaaactcattatctatactgctacctaaatggtcttccaccaaacaagtatgatgatgtcatttgctgggaaagccagtcctttcctctttctcctgatgacttctgactttctccagtcaagccagtatacctccttgggaaattttctcactccctccccatcatcaagggtaagaaaccaaccctctgtgctcctacagcccctacattttttaggctgttttaaagcctcaattttaatgttgtctcttccttgccatccaatgagcatcctaaaagcaggaccataatgtgttcatctttgcatcccagaaaccagtgaaggctatttcgttggataagtgtaagcatacctaaaacaatacaaatatatttattcagaaattttaaaaaataatcaaaccataaatataatcagctagcattaagctactatctgggtttacttgtcagtctttcttcatgaacactaaatatgaaatgatattacaaatttgtgatcttatatttatacaaaataatgtgtgtatgtgtgtttacacgtagaaagatactgaaagggccgggcgcggtggctcacacctgtaatcccagcactttgggaggccagggtgggcggatcacaaggtcaggagatcgagaccatcccggctaatacggtgaaaccccatctctactaaaaatacaaaaaattagccgggcgtggtggtgggcgcctgtaatcccagctactcaggaagctgaggcaggagaatggcgtgaacctgggaggcggagcttgcagtgagccaagactgcaccactgcactccagcctgggtgacagagcaagactccgtctcaaaaaaaaaaaaaaaaaaaaagagagaaagaaagacactgaaaggatcctgaccaaaacgttcctggtagctgtctcaggataatggaatttgagattattctactttaattctttcatatagccttctaatttgctataataagcatggatgatttttattttggggagaaaaaagcaattgagattatatactgtcacttcccagtctttttttaaaagtcagcttccattctaaagatatgtttgcgttgaaacgattgttctctacctttctacatttaaaaaatatataatataatatactctgagtttcaccttcctaaaatactttagaaccataaagggaagcttgttttatcttcaaatagtttttgtggtctgtattttactggatattactatatggctcactagggtgtgcccatccaaaaagtcagctcaatgtcttggaaagataaagggttctagagtcaaacagcatggtttaaatcttgttttataattgttacatctctgacattgagcagatgactgaactacattgaatcgcaactaaaaaattcaaataatttctgcctttcaggtttatattagaaatagtatggaaaatttggtaaagtaactaaactaaaaacttttccaatatgagcatccattggatattctagataaaatattacagatataactagcatcctttaaaatgcctgattgagattagaaaaacagaaaaggatatttccaggggcaagacatgcaagaaataaaatagaactgggaactaaacaggtaaaccctggatctaaatttgtggttggtatagtttggataagggagagccatcagttttggcaattgagtggcttgaatattcttgttcaccccaggagagatgtggctttgcaactctgcaaggtagtgtattgggactaacacttttaaaataaggattttaaatgagattttcaggacccctgaaacgacccctgaaaatctacatgtttggtgaaagggtgtactagggaaaaaatatgtatatgcatatgtctagctacctaccttaataccatgataattaacatgatttgatttaactgtcatcttactatctttgcctaggatctaagtggaaatttataaccattgtcttatacctcaaaagacttgatgtttgaatttatactgctcagtatggtgtgaaaatgcctgagctgaaaaattaagtgaaaaaaaaaaaaagattccaggttagtgatgttgcagggatacctagaaattaacgtaaaatcgctctgagggaggacatggacttgacccagggagcacatgattcccacagattaaaacccactgaatctgaaaattaaaaacatgaaaaaagtaaacaaggcatcaaaataagggtcagtaaacaacctaagggctttttactaaattttgactttggtgagaagtatacaaattagtattttagaataaacagaatgcaataacaacaaaaaataaataaaactagaaagtacaattttcacagttaagatgaacaaagaagagacaaataatggaaatttaaaaattcgataaatccaagtgaagggaagaaaggaggaaaggaataaataagcaaggaaaaaatggaaacataagtcattatactaatcagattaaagccaattggatgaagatagagcttctctagtcagatttaactcaagagttttgctgaaaggttaaaggtaaaggtggggacaatatttaccaggtaaatgctaactaaataaattaatatagttttcagactaaggaaacatttggcaaatatgttactgtgatttaaaaaaagaagtcaccacataatgataaaaggaagatattatgatttacaacctgaatttatgaaataatatgacctgaaaatatataagtcaatgacttttacctaaaaaaagataaatgcatgacattgtgatattttaacacatttttctcaataatttatagatcaagcaaactaaaatatagtaataatctagaagatcttgaacaacacaaaaaagtttgagctgataaaaatgtatagaaccctgatacagaactaaattatgaatatttccttcttgaatagagatgtagactattttttaaagttttttttttaccatgtactaggccacaaaacaaatttaaacaaatatcaaagtatcagtatcagatagaacataagctctgtccacaatgcagcacattaacaaacaaaacacaaataaacaaatgaaaaaggtaaaacttttcaatcaatggaatttctaacaagcgaaaatcttatatatttgccaacagaattcagcaatgtattaaaaaccacatataatgttaaagaggtgactttaatattaggtggtctattaatgtaattcacaatatttgtgaattaaataatttttaaaacaggaatttttactagatgtagtttttaaaaccctgtaaaatcagattccttcatgatgaaaaaattatagtaaactgggaataagtacaatgtaaaaagttttttgatcacagggtcatcttcagaatgcccagttttgccattggtctcctacctagcgcagctggacaaaaaataaaaacaaaaggctgggcacggtggctcaagcctgtaatcccagtgctttgggaggccaaggcgggtggatcatgaggtcaggagatcgagaccatcctggctagagacggtgaaaccccgtctctattaaaaatacaaaaaaattagtggggcatggtggcgggcgcctgtagtcccagctactcgggaggctgaggcaggagaatggcgtgaaccccagacgcggagcttgcagtgagccgagatcgcgccactgcactccagcctgggcgacagagcgagactccgtctcaaaaaacaaaaaaagtctgaggattgaaaaggaaacgacaaaactaacattattcttcatctactggaaacaatatagaaaaattactaagaatcaacaattactagaacaaataaaacagtctatgaggacttctaaatataatataaatttatataaaactcaattatttttattatccccaaactattagaatacaaataaacctacacgtaattatgtgtatgtgtgtgtgtgtgtaaatagctagataaaaagctactatttactgtaggactgacacctataaaatgcttagagtaaggcatatattgctaataaaaaatcatcaccatttttataatgaaagctttaaaactttactgaaactataaaagaagacctaaataagtaaaaagataaactgtgtgcataaatgggggaagacacagtatcataaaaatgccctttctcctcaaatacactgatacattcaatgaaattggaatcaaaatcccaacaggcatttgtaaggagaaagcttcacatggaatttcacatggaagagcaaggggcccttttgaaaaggaaaactatagaatgaacttataatgtaaatcaagacttttatgttgctgtggaaatcgctatagactgctaccgataaaacagtagataaaaaatagaccaatgaggctgggtggcatggctcatgcctgtaatcccagcactttgagaggccaaggcaggcagatcgcctgaggttgggagtttgataccagcctgacgaacatggagaaaccctgtctctattaaaaatacaaaattagccaggcgtggtggcgcatgcctgtaatcccagctactgggaaggctgaggcaggagaatcccttgaacccgggaggcggaggttgaggtgagccgagatcgcaccattgcactccagcctgggcaacaagagcaaaaatagaccgatgaaacaagataaccccgaaaaaaaaaattatgaaagtactgaaatgatatatggcaaaggcagtattacaattcagtagtgaaaggattaactgttatcttaaagagattaactagtgctggacaaataattttaatacatatttggggggaaaaacaatccttatttcacatcatttaaaaaactatactgtgggccagacatggtggcttacgcctgtaatcccaacactttgggaggccaaggcaggtggatcacctgaggtcaggggttcgaaagcagcctggccaacatggtaaaaccccatctctactaaaaatataaaattcgccaggcatggtggcacatgcctgtaatcccagctacttgggaggctgaggcaggggaattgcttgaacatgggagacagaggttgcagtaagccaagattgctccactgcactccagcctggacaacaataatgaaactccgtctaaaaaataataatagtaaataataataataataataaaaacctatattgtaggtgcttgaaaccatataggtaacaaacaaaaccttaaaattattgaaaggaaataaaagagactattttatgatcttagattaaaggaatgtttattcaacaacatacgaaaaacacaaatcatgaaggatacaaaattctcttatcaacaaagcagcataaacataatgaaaaattaggagtcatagaccatgaaatggtatttacaatggctttaattataaagaattaatatccagtatatgtaaatatacttatgtattaatatagaaaaacaaaacttaatttaaaataggcaaaaagatgaacaaacaatatgcatgactagaaacctacttgatccacaaacatgtgaaaagatactcaggcttgttagtaatcagggaaaggcaaaataaaacaataattaagtatcatttagtaaccatcagattgaccaaaaaaaattacatatttggcagaatcaagtgctgacaaggaccagcactttgggaatgggaagcctttgtgcagatgtgttaattgatacaatcattttggtaaatactttggcaatatctaatagttgaagatgcaattatcttaacctaatgataccattttagccttttttccctcagaaaactcttgctatgtgcacagaggaaaagaacacaaatatttcaagtaacattgtaaataataaacacagtgattaaataacaataatagcaataataaaagaaccaacctaggtatctatcaagaaaagaatggccaaataaattatgatatattcatatggtaaaatatttatgttagtgaaaataaatacgccagatctacttgtagcaatatgtgtgatctcaaacaatgctaaggaaaaaagaaaaacagccagctacaaaataagtatagtattgaaacatctatgaaatttaaaatatgtaaaacaatacactgtgcaaaaagtgtaaaaatgtgcatgggaaggaaatgagatacaggaggagcatacaggtgggtttaaacttgatcagtatttattcctttcacaccaaaaacaaaagatatgaagaaaatatggcacaatgttataatttgacaaagctgtatagtaagcctatgaaaatttgttatagtatagtctgtacttttctatataagtgaagtattttctaattaaaacaataataatagcatgtatagtctttggcacatcatctcaggctcaaaaagtgaatgtttccttcccttcccattcttggctggagggttatatacaaagtgcccagacattaccctctggttcttagctcaaggctacactggaatacttggactcttcctgagccaaagtcatcctaggtggtcccatcttacatcttctaactcagacaatctgggtggtaggtccagacctacacacgttctcagtgcagaattttaaatgctgaagcagtttctagcctatggaaaagctcaagacataaggatacaacacaacactcctccttaaattagacccatggattgcagaactaatcatcacatccttcccagattcttctttcatagttaaaaaaaaaatgggtggacagaaagaggaaatggcttgtccatggtcaatgagtcaacggtagtatttcatagggaaatactatgaaattaatacagaaaaacaaagatttggaagtcatgaaacacaaattccaaatctttcaactggtctttgtatgtaaggtctttgtgatccaaaacaaagtcttttgatttctattctgctgtactttgagaaagcttggggcttctgtctttggaaagcactgtcttggaatggagttagacagaactggttcaaatccctactccatgacaaaaatattgtgactatcggcaagtagcttaatcttcctaagtgttagtttcctcatctcacaaggaggataattattcgagggattgttcttttggttgagactgtaaatacaaaatatgatacgtagtgcgtagcatataataagtaggcaacacatagaaactatgatagctgtttttattccagaggatgaagttttaaagaaatataacacagtttagttatagagactatttgaagagatagacaatgataaacgaatgctatgatatagaaacaataggatcaataatgagtatttaaggagctcagagagagttttctggaagaagcaaaatgtgatgtttccatagggtaatgagcctgtctctccccttcctcctatatgacttttttgtttcttatttgaccttcacagtggtatgggacaagaatcaaacatcctaattaaaagacagaaaaacagacccccgcaaaatcacatgacttgtctacagatttcagataggttttaattgacctatcatattaactacataccaataaactttaatttatgcattttaaatgcatatttaagcttaagtcataaggtgcttaccctccttatgtatatattaatattttagataatgatttcacaacctgtaattaaattttagtgtaagttgtgctctaaattcgatacacatttaccatcagtatgactttctgaggcagaatactgagatcatatcaaccagaaatgccagcatttttgtttctaattatcagaaatacaaccctatggcacatatgccatttgcgatatgtgttaaagaatgacggttaaatgtagaaaaaagtgttttgttttgttttgttttgtttaaaaaaaaaatgcatgagggccaggcacagtggctcatgcctgtaatcccagcactttgggaggccgagtgaggaggctcactggatcccaggtgttctaaaccagcctgcgcaacctgattagaccccatctctacaaaatatattttaaaaattagccactgtggtggtgcatgcctgtagtcccagctactcgggaggctgaggtgggaggattggttgagccagcgagtttgaggctacagtgagagctgtgacttctgcctgggtgacagagcaagactgtcttaaaaaaaaaaaaaaaatcgcaaagattccacagaacaacccttcaaaatagacaaacaacttcatcacatttaaatatattagctacaaacataaaatattcagatgcagactttatgatttactactacggatggttgaagtttaaaaagaaaaaacttaaaatggcattcagaatttgatgtgagaaatcagaagtagccaaaataatcacatctcaggtgatctgctaaaattttagttccaaagaaagagtaaattggaagtttcagcttggtagcaagctgctgtcgctgcactaaatgaaaagattttgagctggacagtggctctaaatttaagaatattctgacgatgttggcaagactggaaacgggatatgcttgaagcaggacattaagccagaggctgctttggccgtcaagattgacatatgggcctcaggagagctgaagaaaggatgacgtggaaactcctgggtggggagaattgagagggcttagggtccatctgaatgtaggaggcacaggaggggaaggagttcaagtgatagcataaggctttccagatggttttaggagcagctgaaaggaacaacttgacaaaaatgtcctacttttagaccaacaatgaaataggttctaacctccagcaaagccttcagaagccactagcttatccttctgaaagaaatctattctacctaggttcttgagaaaagagccctcatttaacattaactctgacttaaacttgggtaaaatatagttttatcataggaatttttccgtggaaaacataatctttttagtaactgctgtacccatcccactgtccccaccttttaacttaagggagtgacttgggtttttatttttcaatctgaaaacttgggataacaacaccttcctcaaagagctgcttaagcttctggaaaacaatgaaatatgaaccacacacacacagctagaagaaggaaggttattaaggtttctgtactaatcaaatatgatgttagtggataagaaggaggtcggtgggtagacgttacagggacacagatttcgccccagggtaaagagaaaccttctgggatccagaattttcagaagctgaaatgggtcacctggaaagagagcaagctgccaggcactgggggtgttccagccaagtgaagtagtagaaaagatattttcatcaagccacggcacacatggtagatgatggctgcatcttcacgggtttgcctcaccaaggttacattacttatttgtctctccatctcttctagtaaggggaccatagcataaattcagtggacaggaatgttgataattaaccattaattgtaatggattaacatttattaaatgttcgtcataggctgggcccatatgtgctttataattgttctcatgcttcatctgcagataaatgctgtgaagccaggtttatgactgatttgaaataggctcagaaaggtaaaacaccggcccatgacttcctggctaataagtgaggcagccaggacagaaacacatgttttcttgtctctgtgttgatatttattgaggaaaaggaggaggaagagacgcgacgagaggacaaagtggagagaggagcaaaacattcacaaatattagccaaccaccttaaatatcatcagccgcaaatcactcgtgacacatgccagaagtgaaaaacacaatgtagagaagtacttttcatactcacccttttccagagaactacccccatctacttagacaatgactggatagccccagtggactgggatgtagtctgaagaaaatttcttattttatatcacaatgtggccgtttaaaaaatataaagcatgcctctgtattttagaaaaaaatgaacgcataatacaaggcatgtcatatttatcatgtaactttgtgtatcccctgggattgttacttttttctccaccccactccagttttagaattatcaccaggtgaagtatatgctcattagtctagatgtggataaagtagccaataagctaaatgaaatcataaaccctataattctatcaacaaattaggattcgaggtttacaaaacaaccatcactcatgcataaaaatctctcaagatattggtatgtccacctatttcatcttcattggcagagcactaaatctccagggatttttggtctacccacaatattagcagttccagtgctgctaaaacaaactccctttggggtaatacatccaacattctcaggaaagttgtgttctttcccagagtccttcaatgctcataaactccagctcattattgtgttgagagtctgaagacattctctgtccattgcccctgcacctgttatcttgttggccttaaccaaacagcccaagtcctaacagcagctgaaataacagacgggcaggagaacttgagattttttgacatcatccttttgtttatgaaatcccccccaatgctggaatctgacaggaattctcttcattatcattttgtgttttttcccatggtactttgttgttattaaaaaattattactaaaaataattgatgcagaggtagatgaaagataggaataacatcttcatttgaaaattgtcaaaaaggacatagggagggggatgtggtcgtgtggaattgacataaacatatatttgccttggaggataattggcagtagctgtgttcatttggtggtgtgtttgtgaggaagcccaagcaggtactaggaggtctttaggtcagaggagagatgcagtctaggcaagttggaaatctggcaggaagcagtccttggaattgcgattcccaggacatgacccaactttgcaaggggtgaggttattaaaacagacctaaaatagggataagataggcagaatataggatatcacttaatagcatatgattgtaagcaagttgctttaccttcctatgcctcagattcaccatctgtaaaatcaacatgtaaatactagcagccatgtagggatgttttgtttctcaaataagaaattcatgaaaagtgtttagcctaaggccctatattctattaatggatgctgctattattattattattttgtcgagagtgaaagaaatagggagaagcaagtggcagggaggcagagagccactgtacacacagcatcagaaaagggtttgctcacgtgtaatggagtttctgctcaggtcttaaaatgaggaaacatgatcagataatgccctaagaatctgatgtggtgctttcccacctctgtgcttttgtttatatttatttttcctggatggcttcctcacaaacgtcttcatttttagtcatttgccatctgatacttttccaacagggttgctgtataggttaaattaaagaaaaaaacaacacctagtaagtacatagttatcagtcaattgatgctggttattactgtacattttagtgtagtccattatacttagctaactgatgtagccatagtggacaatagaaagtattggatagctaaatgtgcatttgatttcaaaaatgagcaagactgatagaacctactccaggggatcaattttccattctctctttgtctgcccagtattgtaattgtataattatgtcttctttgtattttccagggatctaaatcttggcagtgtgtaccagtattgggtcataactatttcaggaactgaagagagtgagccatcacctgctgtcacatacatccatggaagtgggtactgtggcgatggcattatacaaaagtaagtagatctaattaaagaaagaagaggagggatgctggttaggtcaagagatggttagggtgctgaacagaagagcttatgacatattcttcagtgcatgagctgtgagctactagtggtccccagcagtctctggattggtctccaaacaatttgctgaactcagaagaaaagcaatgactctttttgaacacgtacattttgcgactatgtaatacaatatatgatttagacagaactacccttatgtacctactaccatttgctcttgctctcagttgctttatgtgtgctacaaggattccattagatttttccctcacagtcacagcgtacattcagttaacaggacacagttcatctaggttaaaacacttttaagttctttgctggttaccattcacatttatgaaaactgcatatttatttgttatctctattgtatcatattatacaacaatttacaaaatgggtcaaaggcttataaaaacagtggagtattttaactcactacaatgtttaaaccataaataataaacagtgctctggagtgaatattgaatgtgaatatgagtacactgaggcaaatgaagcatcatttgtgggtccaatcagtaagtgtggattttatcagattatcaacccattcatcttcctgttctcaggacaagatgctatgcaactggcaaacaggggtgaggagccaccaagacttttgcattgtttaaaactcaataaataaacttttaagtgcttttcctccagaataagaaaaaaagttttctagtacaaaatagagaattttgtctctagaggtggaaaagagaccaataattattcaaaattaaatctcttattgctaaaattatgttcctcattgctaaaatgtttatttgcaagtcacactattgctaagagactttttaaactattgacagatttaatgataaacattacatgtggagaaggcaaaacaagctattggcaaaattccttcattaaatagcactgttgggtgtcacataatatctgtgcaatatggaattgcaattactatttctataaggggaggggtggtatgaaaaaagaatttgcttcacagttggatgaaaccactgatgtgtagaacatgaatcaactcgtaggagtagtacatatatgaaagagacacattagatgactctttctttctgttcatcactaacactaagctagaggggaagaacaatttaatttgtttctgatgattttgtggtatggaatgtaaactggaaacctctgctttaggatgaaaggaccagctaggaatacagcaaggatgatgcagtaatgcaagtgaaaagagctggcatataaatactcatccacatagacatcagttatttgccagcagtgttctttctgaacatgatttaacattaaaggcaatagaaatattgcaaacatgatcagatgattggtaaattatatcttttaaacttgctgtgtaacaagatagtagcatgtacaagattctgttcctctttgctccccactccacaactaaagtttgccaactgttaatgaaaagataccaactcaagtttttaaaataagaaatggcggccgggtgcggtggctcacgcctgtaatcccagcactttgggaggccgaggcgggtggatcatgaggtcaggagatcgagaccatcctggctaacaaggtgaaaccccgtctctactaaaaaaatacaaaaaattagccgggcgcggtggcgggcgcctgtagtcccagctactcgggaggctgaggcagaagaatggcgtgaacccgggaagcggagcttgcagtgagccgagattgcgccactgcagtctgcagtccggcctgggcgacagagcgagactccgtctcaaaaaaaaaaaaaaaaaaaaaaaaaaaagaaatggcattaaaaaaatattggcactgatgaggcaagtaattatttgcataatctcaagtggctttctgaagcaggaacatagcaggaacatatatgtatatttatctatatatttccggatcatatgtttatttcttaaatgtcctacacctaaaattttatatctgaattgtcaaaatgtttaagattgaagagattagtgtaagggtttataactgttgcattatggtgcaaatcagctgattgccaagaatttgactcctcaagcacagaatagaaagctcctcacttgtttgagctatttaacatacaatgctgtatgtatttaagatccacattcatatgaagcaacagaacaagaagatacagtttccaatgcagtaaaattggggaaagggaaacttctcactgttctctcccacattaatacatcaaattccagcttttgataaagttgctgtctgatggaacattgaacaactaaacagaggactctccatggagaaagtaccccatcatttgtgggtccaagattgaacttcatatctagactatccagaaaacatttgcagtcactggtgataactcataattgtgatttgggaatttctaatttagcccaattttttttttaagtcatcagatttggagcctcatctacagctcatctcagctcatggtggaaacagatatagatgaattggttaaacactgcaaatgatatcattcttgctgatctaaaactattagtatcataattattattaattttaaatagtatacttaatacagtttttttttagtatttttacctagaattagtatctttcataaacatcaaacacatgttcagttacctgtagatatcaaatatttgttgatatactttgtagaaaactaaatttagcttatggatgtttccctaagtaggggtgggggggtaggggggaaggaaaactttggggaaaagaagggatatcatcttagctaatacgatttttcatggaatgatgcaagttaatttgctctgtctgtaaaataatttatgaagaaatatggatagactcagcactcagtgaggcccttaatggatgagtgctgtcttaaatgatccatagcaacaggttctacatttgatagatcgggtaaaggtgaaggcaatggatgaacgttttgataatgacaataatatttatacacacttcttgagtctctactgtgcatgaagcactgtgctacattattgtctccttgagttctcccacccaacagccatgtgagataggtcttattataatactttacggataaacaatgaatacacaaagagattacagaggttttctcaagcttccacatctggtaagatgtagaaccaatacatgaacagagggcccagattctcatctggattccccattgcattgttgtgtgatgtgacaactctgcaaaactaacaagtaaaggagtggctgcatgctgtctgttatatcctaggcactgtgccagaaactggggtgctaggatgatgaagactctgtcacttcctttggcaaattacagcctcttataaggggctctcaagtaacaggcaaaggcagtcagtttgacaagtgctgtgatagatggagcaagatgtctgtggacacagagaaagatggccacccgctccagccccagaggtcaaataaggtttcgcagaacttctttatctaatgatagatctgtcatgcctagaagatatttgtagtgacccgaatattttgtttaaaccagtagaacactgtttgggtggcgatggaagggaggttgaaagtaagctttgtggcttagggaaccagcccaggtatttttttgtttttaaagtcttttccaaaacaacctatgcattagcttagaagcacaaggtcatcggcaatttccagcaagcaagacccactgccagacaatgctgagaccagctaaaaatacaaacttcttctttgctcataggtgtgcagacaggagaggacttgggtggctccttggagatcaattcaatgccctagccatcttaaggattgattgcaaggcattatcctgctactctgacacctcttaaaagcaacaaacattgcccagtgttaattgcctgggtgaaaggaaaagtctaaggcctcttccatgctgtgacaggtcccagctggtctctggggagggagggacagctgtcacacactctgcagagacctcccaacgcaaagtgggaatggggactgtgattccttgagcatcttctatgtgtcacccactgtgccaaccactttaagctactcagaggcataggactaattatctccattttagcacatgagaaaactgaagttcagcatccacaggagcactgttcaatggatttttctgcaatgatggaaatgtgttctgtgctgtccattacagtagccactagctacatgtggttcctgaatacttgaaatgtggctactatgactgaggattggaattttaattataattcatttcaattaatttaaatgtaaatcatcacagaaatatcagatcaagaggtcaagtgactttgtcaagattatacagttagtttgagacatggggttctaaacccaagtgttttgttttttaaaggatgaccgttttccagaaagcagtaacccatccagactttcaggtgttgttcctccttctcatcacctaagcccaattcaaagatcattgctcattttctgcccatcccaaccctttgcaaaatcatccttaggtggtggaaataattccaacaaaaacaaagggggcattagtatttcataacagtgtagtctcgcagcccttggagttcttgacaccaacaaatgacacacccgatggagaaagcaaaactttccaatggaaggatgactaaacttgaatgcatgaatgaaaaaaaaaaagttacctttaagtatattgggggaataagaaggatatcaaggcagggagtggtgaaggaccagaatctctacattttccttcaaatatgctttttttaagatcagagacaaggaaatgtctgtgagacttcctagacactgtgggagcaagaccatttatttgttcattagttcttccatgtcttactcccatctgacttaactgacttgagatctcagagaatgagttggaatcaggacttctactttgtcatcagaaacacaaagcaaggcaaatgtgaaagtatcttataaatccataccttttagaaatctcattttgaagatgaagaagcagagactcagacagagaaagggatttgtgcaaggtctcactgaaggttcatggcccagggagggacttttccatgtccagccatggttttaagactaaattggcaaatttctcttccatatctgctctgcagagaccaaggtgaacaatgcgacgacatgaataagatcaatggtgatggctgctcccttttctgccgacaagaagtctccttcaattgtattggtacgtctttttcatttcttgtggccttcatgaagaaatgaacggtgcagaatggttggtcaatgataatgccaacaatagttatgactaaatgatgattcactcctttgtattacacctgtttattgagtgcctcctacatgccaggcactgttttcaatatcgggaaatacagcagtgaaaaaacaaacaaacaaagcaatccctcaagagcttaagctctcatagatgatgccaatgacgggtaacttcttttgatcaagctttaccttacaaacatccctgcttttcttcacactaactgtccaggatgggtattactggagatgttttaaggcttttattcctacttcagagataagaaaaaatcaaacgccagaaaaatttcaaaagttgtccagagttatacaggtcaaaagtgattaaagacagaatcaggacttgaacctgattttgtctgattctcaagcacgtgctcaactcattttgctttgcaacctccagccgtgatgcaggaaccaccaaggtcccctctgcagactcagaaccttgggcagtctctctgatctgaggaaggaggaatagcagaccagcctgtgtttagaaagcaaatgtccttttcccaccttcaccgagtcatttgggaaatttgttttcctctgccttctcttggagtctggctgatcttgttgtttcagccccacttgggaggccctggtcagccccgggctggtaaacagacaggggttgggaggggcaggggtggaattttgagctggtccagatgagatcatacttcctttaagatgcaaatcgatacctgaagatcaaaggtcccccagctaatcccctgggctggaggtgaaaactaatcacaattcatttgcaagtacaaaagacagaggtgctctatctgaagagagaaggggcagttacaagcggatgaaaaccttcgtgggaagatttctcactgacaggcaattttctaggactaaagaggaaaagatagcattgcatcctcgcatctgcagtgcattacaggggtgcatttagacattctttctcccagtagattgtgagctccgtgatggtgaagaccatataccatgtgtctcttattcaattctcaacacgcatttgttgagcacctactatcttcttggcacccagtaggggttgagcaacacaatagaagtgctctgtaaatatttatggttggaagataggtagatgccccaggagaaaagacatgggagtttctaggcagggccttgggttttaaattgccaaaaaattttctctcctctgttgatttgaatatggtccggtccctagtaaaagcttgatattagcctagtgatgtggtggaaagaactttggattaaaattaggaaaaccaggttctagtaccaactgtgctgagaacttacataaagctggccaagtggcttccctagtcttggcctcagtttacctactgtaaatttttaaatgattgggttaagtggtcctaactcttaacttaagagccttacctgcacttctgttgtgtgattttttgaggtgggtgactgaattccttctaattgtgaactctacctgagccaaactcttacctttgtcgtcatccttatggcaaccaacactagtcccagaccatgctgaaaaatatctgcctgtttgacttgcactaatgtggcatgtaatttatgtgcttctggaaagaaagtaggatggggtgaaggtaggatatggtaccctgaaagagatgcttgagccttgacattcatctgctgtgttgatttagagctatgcaatgatcaggaaaaataaggacatctctaataggtagaagctcctcatccatggaaggggtctgcaaactatggtccataggccatagccagcctgccccctgtaattgtaaataaagatttattggaacacagtcacactcatttgcatattgactgtggctgctttcatgctacaatgagagttcagtgatgacagcagagattctatgacccaaagaaactaaaatatttattatctggtattttacctgtgaagtttatcaacccttgttccatgaatttgggatattttatatgcttgtttactggagccaggtgcagagagtaggtgaaaattataatgtggttcaccatttcttgttaacaaaaaactgaattttaaacatacagtgtagctgggagtggtggcgggcacccataatcccagctactctggaggctgaagcaggagaatcacttgaacccaggagacggaggttgcagtgagccgagatcatgccattgcattccagcctgggtgacagagcgagaccctgtctcaaaataaaataaaaaagatgagggagtttccaagaggatgagactgagatcctcctagattcattttatagactgttgttctctaccagattctgtgttctgctgctgatggtgatatttgcttaatacttcttatataccaagcacatttataaactcttattctcgtaacaactcttttactgaactgctctttcaaaagaggaaattgaggtatggggtgatgatctaaggatacacagttaaatggtggagctggaatttaaacccagagagcctgactccagagctcactgtggtaagctacctgcaaaaaaaaaaaagatagctcctggtcttgcaggctttcagggtgaatgaaaaaaaaacattgcaaaacaagtcgtatcacaaattaatggaatggaatacaaaaccatcagtgttgtggacagtgtctagggaaggctctctgttacccctgtatgttcagtggaatttgtattacaggaaagccttcagctacgcccttcactggccacttaaaatctcattatagacactcacagagatacaggcatcccagagatcccagctcccagggactacattccaaggacaaatcgtgtagctgaagtctagaaaactatcttcctccgaaaggaacagctgaaaaatagacagtgaatctttactcccagcagaccaatctttaatgagtcagagaagagagacaagtgtgggaggctgtgctgaggttgacattgttcccatgattgcatttgttaagacagtggtcaagataacagtcaggagatcaggcataccatgacttagatgtgtaactttggctaagcctcagtgttctcatgtagaaaatggtaaaagccctagaacccaacagtggaagatattgaccaatatttttggatactttctatcagaatttccttcttagacttaggagataattattctaataaggaagagcccaacgcttagtatagaagttgattatccaagcatctccttctccccgtcttctgggtagcttgagtgtgggtatatacaacctaggctttccctctgccctccagtcagacacaccaacccaagactttgaattggaagctagtagtgattagacttagggatactgtagacaccattttgctgaggatggtgggagtagccacatccataccagcctcctaagtaccagggaaggcatctagcatcaaagctgagctagctatgcacagcaccagctctggatcccctcactaaactagttctgggacctaatcttgggcttggaattgagcttcagagcacgcaagcctggctctccagagagtgttccatacgtaaccaatattctttgaacaaattttgcttgtttgttttgcttaagttatccaaagttggtttttgttgactgtcactcagaatcttgactgaaaattattgccataagataatgtgagatttaaccccatttctagcaagttggatgtgcttgatgcacagatgcacattagctattacttttctctatgtgtgtttgtgtggaatgttgcgggcacaggataccagcaacaaccaccatttatggatacccactaggtgataggttcttcatacgcatctttgttttctgtgaactacgggtcgtctcttgtttccgtatgtgagatctgaggtctcttatgacatcttaacttgcaccaggtcacacagcacacagaggtatgatcctctctccagtctgagtagagaacctggctttttctactctgccactctgcctctccatttgaatgactttcttccttccactgttctttctttgttcttcttttctcttcaccccttcctcttccccctttttcctctcctcctcctcttcttccttcactccttcttctgcctcatattcttctcctttttctccttctcttcctccacctcttctaccttcttgtccttctcctgcttcaatttagaagggctgatgttttctctggcttagtaacaccagcgttagggtgggtgacagatttatggtgacattcccattcacttttcagaagcccacacatccggaagtattcccaaggtgccagtgtgttattatgcaacaccctggggacttcccgttctcaatttcccacccctggtgccctcatcccccagcacataataagttgcttgttaaaatgaacaccacccacatgacctctcaggcaaggcaggcttcatccctttgcaatgtggaagttatcttgtctttttttcccctcttttaaaaatataacatacaccaggcctgaggtttcagtgaaaaaatgtggtatcagtaaaatgataactctccccaacaggcactggctgcaggcattgttcacagcattgggaattctgtctctaaagcattgagtcataaactacagacaggctgctgataaaagctgaaggaggtgggataatagtcaaattagtcagacaaaatgtgaagggtccccaaaaggggttatactgtgtaatatatctttagctggtgctggaaatgtgttaccttctgagatggaatctagtgcattacaggagatgcagctgtggagaagccctcatgctctgttttgactttccaccctgtattcttcagcatagttgggtccagttcccagtttagatctagaggcctcctggctgcagcttagcacctcagagcctcagtttcttcctttgtgaaattagggagactggactgagactctaaagcttcttccctcatctgatactgaggaatctccgatttgtcaaacagctatttaaaggctttaggtttcaaatcctgcctgacgctgatatatagttaagaaaacaaaggaaagggacccccacgtcgtctttcccagacgtggaggcattccctgtgtgtctctttttctccctccctccccactcctcttctctcccctactcctgccattagcatcactctgtgatccctgacacagcatccccagccctgtcctagagccagggccagtaactcaattagcaacccccagccccagctccctcccctcccctgtgagggacatcgaggagaggagaagaatcggtctgcctccccaccagttgctgggaggggcaggggttcaccgagccttgtggcccctctgtcaggctgctctggcctgctctgagccaaggcgagaaaggaaaacaagaagatgaatcgccacgtcttcttggtggaggttccgatgagactttagaacaacagtgactggaaagaaaaacagcatctgctggaggagagggggaagaatgggctctgctgggagttgcatttattattatttttctttctaacaacgtgaaatcataatagatgatccacctctcaccttaaaaaaattaaaattaagaaaacaaaataaaacttctccagactgcatgtattcaatcagacctccctccgtggaaaaagtagtaactttccccagaacacgtttttgaaataaagcttcccttggcttgaaggcaggcctatgaaagaggaaaaagaaagaggaatataggtgggggtcatggtggtagtgattaaggtgacgacgagggtgataatatctcagctaggttggtggcattcttaacactggagtaatgacatagggtatccattgttaagaacacggattctgggtggaaagcctgtccctgacacttagcttgtgtcgcagttttttcaatcataaaatgggttagtaagttcctacttcttagaattattgcaaggaaaaacaagtttatttttgtaaagcatttaaaatggtgacacctgcctgacaagtgttatagatgtgtttgctactgatgctattattgtcataattaatattttattttttattttaattttttattttttgagacagaatctcactctgtcacccagctggggtgcagcagcatgatctggactcactgcaacctccgcctcccaggttcaagtgattctcctacgtcagcctcctgagtagctgggattacaggcgcgtgccaccacacccagctactttttgtagagacagagtttcaccatgtcggacaggctagtctcaaactcctgacctcaggtgatctgcctgccttggcctcccaaagtgctgggattacaggcgtgagccaccgtgcctgactgaatatgattaattcagaagttatatccatcttcccagaaaccctatgagataaataatgttatccccgttttgtagaggaaaaaactgtggttcagagagatttagtaacttgcctacagttacacagagacatagcagacgtgagattcacagcatctaggcagagtctacacattttaaccatgaagttattccatttattagatacccagctgtgccagtttttctgctaagaactctttgtaaaaatgatttcattcaccctcccagcaactctgtagagtcaaaataattgcaccattttgctggtcagaaaattgaggcgttgagaggttaagtgaatatccaaagtcatatagccaggtaggtcagagaaggagacttcagagtttgtctgtctgccctaaagcctatgtccaactccagactaactcttgaaatagccagagagtgtttctcttttccactatttctgtttggtgccattgaatcacagcaggaaacaaaagtgaatgcacatgtccttgtgccattttcatgagtcatgaaacaacaattttcagttattatcaccctagaaatgttccatggcataaagctcatacccccaatggagggtcattctgtattttaggctgtattttcatttttaacagatcaccctccattgacagtagccaaatcgttttttttttagcatagaatgtgtttggcacttaataaagttgtcatagcaatgttggagacagaggagcttgagttcaaatgtctattggttgcaattactacatgggtctttttaggcatctctcaatacctctgagtctcggtttcctcttctgaaaaatggacgtaattataacacctatagttttgttaaggaaaagaatgacataacatctatagagtgtttagcacaatgcacagcagttagtggacaatcaaggatgtcagttaacgccacctcttcttccccttcctcattgcctatctcaattgtgactgatgcaaaggcagccaacccatcatcagcaaaaatggtcctgaaccaaatcctgatgctaaattacagtggtgccatttgcaaaatgatcaaacctcctagttctcagtttccccactgtaaaataatgagggaatttgatgagctcccagggagctttcagctccgatttttaggatttaaatcccaggttgttattgttttaaaactggtacattttaaaagaaatcagggcttggggaagagaaaggaattcctttcacccaaagggtcaaagggggtcactgaggggacaaaagagcaggaaaaggaggcgatggggcggaaggctgacgtgcgggcagcaccaaagatctgaagtactcaacagggaggtctgatggatgcattcaaacacccttgagtcagcaccggttaggatcaagcttgccatcctgcctcagaccaaggcttaccacctcctttggaaacccgggaggcctaccccacagagaggcagggctggaatgaaaagaaacagaacggcctctgacgccagaagggaggaattctagcccgcagcccaggtctgcttcctgactctcaggaaggggtcaggctcagggaaccgacttggtgcttgcttgaatgtgaggaatcgagaccaaactttgatgtgtgcctttgaaaggcagccagagtccaaggcaggtgaatctgggtagccaagaacaaggacttcattgtgatatttaaagtgaccagaaattcatctgcacatacatgtgccttgatgtacatctgtgcagttatgactgaggcggactgggagagggtagaggcctctaggctgggtatcagggccttttcttagctcctggctctcagttgtttcttggagtccatgttgggttggaaaagacatttaatattcatgagctgtgatctctacttgaagggagtgccctgagggaaattgaaatattaagcaagtgagggatatagacctaattgtagcctccttttctttttggacagaaaagtaatgtgcctaaaataaaatgatggatgggcagtaaggattgtgtgaaaacctcactgctagagcctgcaggaaaaaatcggctgcttgccccaacatgtgcagtcggacccaggcagaagattctgcaaattggctgctggatgatgtcattcattcatttagttcatattttttgatgcctgctgtatgccaggcactgtgcttgtttcaaagaaaacagcagtgaaaaaggaaggccagggaggttaggaaaatgatacaaataattatttaagtgtcattgtggaaaatggcactaaatggaaatacttggaagtatataaccaaagggcctcctttacattgagggggtcaaggagatctccttgaagatttgacatttaagctgagacttgagggttgagtaggatgtggactcattagggagatatggaacaggtaactgagcaaggattgcaagaagttaagactattcaattcccaaggcagagaagaacttttgaagagggaaaagcaagtcagcattgctggactgtagtgaacaaaggagggatgaggctgaagtctagcagtctctgatttctcaggcccttgaggactgtggtgaagctgctatttacggcatgaaggaaggagaagttgactcaagcatataccttctacactctctaccaagccctgccctgggcataatagccatgtgcatgcttgcacagaccaggtgtcagtaaaccaccacccatggccaacccagcctgctgcctgttttcatagacaaagttttactgaaacacaactatgctcctttgtttacatatttgccactacaaaggtggagttgagtcattccaacagaaatcttgtatggaccacaaagccaaaatatttaccatctggtcctttactgaaaagttgttgactgctggcagaggtggatgagtacacagttggcctgtcatatcctcagatcctacatcctcagattcaaccaatctcagatacaaaatatttgaaactaactggctaaataaataacactacgacaatttaaaaacagcacaaatagaaaaaacaataaagtatttccaatgtattaagttttatgagtaatctagagctgatttaaagtacatggtagggtgtgcataggtcatatgcaaatactaagggactttatataagggtcttgaatatcttcagatttttgtatccaagggggtccagagaccaatgcttcgaagatacctagagatgactgtgtaagcgggtaaaagtatagccagttgggcagaataagccagatgagagagacagcgcgaggagttagacaatcatttcatccatctccctcctgagcctataccagcatagctataatttcactgactcctcatgtattttacttccacatctgtgtcccttacccttaagggaagaagccttgccatctaccctcgtgtcccaacatccagctcgagccaatcattgagacactgaagcaaatgacactctgaggctaaaaagggtggccagaggaacccaaacagatgaccttccaaacggtttaggcagcatccaggatcctcccctgaccagtagaagggactgtattgatatttatggagaacctgctgcagtagctcatttcaaacccacagcacccctggctaccaggtattgttaacaccacattccaggtgacacaacagagcccccaaatgtttaagtgacttttgagaatgtggcctccattcaataaatatttactgagctgggaaaccacccaccagacaagcaaatcttcctgagtgctgcatcttatgccaggccaactgcctcacaccccacttaaccatcctcttgattttcccaaggctacgggaaggtaggggccattatcccccactttacacgaggagaagttcaggctcaagaagatgaaatggcttattcaaagcgggtgcttattaagtgacagagttgagatttgaaccaagatctgcccaacttcaaaactaaagtcaccagatgacctcctccaaaatatgaaacctttagaacaagaaggagccagtgagaaatatacagtcatccctcagtatccttgggcgatttctgccaggacctctgtgaacaccaaaatctgtggctgctcaattccctgatataaaatggagtagtatttgcatgtaacctatgcacaccttcctatatacttcaaatcatctctagattacttctaatacctaatacaatgtaaatgctacataaatagttgttatactgtaatgtttagggaataagaacaagaaaaaatgtctatacatgtttagtacagatagaattttattttgcatctcttgaattcacagatggagaacccatgaatatggagggccaactgcatagactgcatatatttccaccctttttccatctcaccatctcagacaaaagtcataatagtatacataactcaaattattaatttaattaaattaattggataaaattcactcaagctttttctctattaattccactggttaatcacattaatgctatgaggtagttttaacattatacaggcattataagtaaggaaatggaggcacagagatgttacgttcccagtaagggattctagccctggaagtctctggctcttaagccctcaggcttaactactaatttatgctacatctccatcattaaggttatctaataaagtgtgtactctcaagagctgaacagcctagcagcaaacagataatgagaaggggaaacaatgcaggaagctaaagaaatcttcacataacaaaaggatcccagggtctttttaagaaacactgtctgaagtgtttgtttacagatcattaaatacttaacagaggaagaaactaaaaaccactgactttctctaagccaatactgattaagtaccaaagagatgttaacataaagcaaataagaaattataataattattaaaggactgagtttttttcattttatcttactggacagaaagataaaatagcccaggtccagtgcctgtcactctgccctcatgcacacggttgcttttctctctcctccaggcagcagccatggtggtcctgcaatcagcctaaaatgcatgtgaccaggctcacactgattattgtctatattaagcacctgctgcatacaaagttctgtgcaatgcagggttaagcagcagaaacctttgttagagggctgcagaagacagtggtcattaaagatatgaagggattggcattagaggtcccctgggagcagtggaaagcctctggtgcaggggttggtgagcctgggaaagatttctggacagtgggactcagataagaccaggtttgacactctgccactataaagatccagacagagggtttttctctatacagtgagtgcaccagtcctaaaggaaactactccagggaagtcacagggggtgagtgggcagttctcatcccatagcaagcagtagtttctgggcagaggcataacatgataggagcagtattttaaaaaagatcaacctccctgaatgggatgctcttcaagggccaacaaaatactcttggcaaactgacccaaagagaaatcagggtgattttagctttcaacagcagtcagaaacccagcccaaattatccgtaagtttaaatttaactatcagccgccattggcaggactctgaaaggtcctggctggagttggttcctcagtttaggagtccaaaaccacatgtatagcttgagttcagcctcattaccaaggaagggtctccacaagagtctgaaatcccttttccatttgtcccgtgtgcattttgccaagagaacttctaaagggacagggagggaggaaaagctgattgaccagccccgaagcacaaggaccacttgtctgcctcagggttcatcccccaaatacctttttccacctgagaagtaggagtgatattcctgacttcatatgattgttatgatatattgttttattaatttataaacttattcattcatcacataggcttttatttattgagcacctcttatgtgccaggttcatgctagacaccaaggatgcctgtgtttgtgacagttcctgtcttccagaaagtgatcaacaaatattgattattatggctaacaaaaataataatctagttcttactcacaagtagagagtgacctgtccccggaagagattgagcagaaatttgagaatcattctttagggaagtcatgcatgagattctattaaatagcatgttcaaacagacatatttcaatatttttctcttttgtcttatctggctctttcttgaaattcagaactcctggtacctgtgaagtgttagcctcttctgtttttcttaacttttctgaccatccctccacagaccttctttcacctactctttaagtatcagcagtctccaatgttccataataggcacacttctcattctccattctctccttgtatgactccaaaatctctatctttagtctgggcctttttttttttttttttttttttgacccatgaacttgtatatctaattgctctactttgacgccccaagggaactcacattcgacacatcttacacaaagcttgccatctttctttccagacctgctgcaagtgtttttcctaatctcaactggtggcgccagtagccaaccagacatttaaacagaagcttgggaaacatccataactcttccctctctgccatttcccacatccaaataattgccattcttcccattttactttgaaaacgttatcttgtctgcgtccaaatcagtctctctcgccccatgatcattactctacctgaggccctcttcagctcctgattaggcttttataagagaaagcttgtaaaatgaacatgttgcttgttcatttttttgcttgccccaatctacctgcccataggtgagagcaagtttcctaaagtgcagacaccttttgttgctctccaattgagagtgtcagatggctccatgttgcccttgagataaatttaaattccttactgtgtcatttaagaccttgcgtgatctgagcccaggatttgcttttcttttctttttcttttttctttctttttctttttcttttctttctttctttttttttttttttttttgacagattctcactttgttgccaggccagagtgcagtggcactgtctgggctcactgcaacctccacctcctgggttcaagtgattctcctgcctcagcctcccaagtagctgggactacaggcacataccaccacacccagctaatttttgtatttttgtagacatggggtctcaccatgttggctaggatggtctcgatctcttgaccttgtgtcctgcccacctcggccaggatttgcattttatactccaataccatcttgtgctttatacctcctactatattgctggcctcatctcatttgctcacagtgtccccctgctggaatgtgctcctcaccacccgttcctcctctgagagatacagcccaggtgttgcctcctaagggaaaccttcttaaatctgggttagattggattgggggtccctcctctgtgctcccacagtatcttgtacctcatgagggtcagaatcctgtgccgtcatcatttacatatctcccctctcactaggacctgagttcttggagcactgagacctgctttaattcatctgatttcccaagagttagtccagggactgacaaataatttgcagttcagtaaatatagaataaatgagtaaaagaaggatgtatttcttaagagacagttttatttttcaggcaagaaagtgtagttgagctttgctggtctttagagtcagacaatcctgtttgaataggagactttcccccttagctgtcatctcgggcaggttatcttgggtcaggtggcttggggtggtggtttcatgctcagacccctgaactgggctgcttgtatccaaatcctagttcccccacaaaaggggtgggggcttctttaaaatgttaatgttactatatcgatacaccaagaggtagaaagtatgctatcttagccagcagtacttttttgaggcttctttcactaagtagagacgggctcaaatgctgcctttccttctctatctctatactgacagaggtcattactctttggtaaggtccaaaggctttagaattttagaagaatgggtgggtggaaccagtgattttggtggtatttggatcaccccataagactctcggatggccccaaattgagctgctttttaataccaaatctcagtctgcggcttgcttccatttggggagagagcctaattaactcgtagctggaaagaactgcaggtctgccaccccccaggcagagaattcaaaaggaagtggatagctgtgtaaataacactgctttaaggggcatttaagccaatgctctttgttaaggaaattgatggctttgtaagtactgcgtctgaagggagtacttgagctgaaggtccccatctcgcctcgtaaatttcctaatggactgtgggcctgcaggctgggcccagcgtgttcaatcacttgccaacaaaaactcggatttcactctaaaaaaattaaaaacgtttaaccaaaacataagttattgagcctgtgcagtttaactgtggcacaaggtagcagagacagattacttcctttaaggaaagggaaactcctcatcttttactttaaaaaatttgttttttaaatgctggatgtggtgctacgtgctttctcaacagcttctcatttttttgtcctcataacagttgggaaggtagtcattattttgccaatttgccaaagaggaaacggactcagggctaaagtgtgctggtcattgacaccagctaattagtgaagagccaggttgtgatcacagctccatcaggcccctgagcccccaagtagtgccaaatcatagggcatccgagagagaatcagatcagcccatctcatcagattctcctgaatatccacatccattcaaaatagattaactggacagcatgggaatgacttaccctcttgaaacctcaatttcattgtctgtaaaatggggataataataggaccaaacacggggctcttctagatttgaatgccttatgtacttgaaacatttagcacaatgcccagcatggagaaagtcatccagttattcatttcacaaatacgctaagtacaattttaactggggaagcggatgatggtataggaagacctagtgagggtccattagcccttctgggggtgggtttccaggcaggtttttgagaggttaaactgtgaataaaggacaaatggggactagtcacagaaaaggcagctctggggatttgaagaaagcttctgcaaacgtggggaggtgagagggaacatggtccactcagggcaacgacaatttgtgtctggagcttagactagagtgcgttcgagaagagagaagcctgcagaggcaggcaaggaccagagtacaccttgtcaatcatcatcaagctcctgttgggaaaagttgaatgaataactcagtatcttctagggcaaccactttcaattttagaccaactgtactttgttagaagagttttccattgtgtcctccctgagccttcttttcttcaggttaagcatcttcatacctacatgattattgctcagtggttggtgcctatccagggtcctattctttgaccatatcctaccacatcagtggcccagaattggcctcttcagccatgactggtccagctaggactggagacaacttctctggcctctagcttggaatctatagccaatgactcaatctgcagtctcatgcttttgtttgggcaaacacatccttcatttggcggaatctgacttcagagtgactgcttcttggaacttttcgtgaacatgaatagttatgatgactcttatcatccctgatcaaaaagggcagtggttttgattgatattttcaaatgttcccagttaactcttaagatttaggaccaggccaggcgcgatggcttacacctataatcccagcactctgggaggctgaaatgggcggatcacgaggtcaggagtttaagacaagcctgacaaacatggtgaaaccctgcctctactaaaaatacaaaaattagccgagtgtagtggtccgtgcctgtaatcccagctacttgggaggctgaggcaagagaatcgcttgaacccgagaggcagaggttgcagtgagccaagattgcgccaccgcactcaagcccaggtgacagagcgcactcaagcccaggtgtcaaaaaaagaaaaagagaaaagatttaggaccaatttatttctgtctccctccctccctccctccctccctcccttccttccttccttgctccctccctccctccctgcctccctttcttccttctctcactgctttccctcttcttactgagagatgagaaagacatatacacaccttgttaaagaagaaaattacagctaagcaatacaaatcagaacatatagatttaagttattatagtatttttattctaagggctgaagagtaacccattcattacataagaaaaagaaaacttacccaagagcaatcttgtgcactgtctctcttctgttctgtagaggactgcagtgtgtctcaccagcttggagatagaagacactgtggcttgaatggctcatctttttagacttatcgaaaccatatagcaggaggatggtctttgaggtgaaccaaaccagtcagagttcagggtgggagggatccattttaacactctggtttctgcatgggagccctgccaagaacatagcatgctgcggtcaccttagtcacaaccagctatgccagattggggtaactggcttggttttcatgtggtgcctgactcatcctcgagtccttggcccactggtagacatagcatccacttgtccaagcttctttctttgctggactcttatgcatgccctatcagaatgacgggctgcttgttttactggattgcagaatagatatgcatatacatatatatatatatatatatatatatatatatatatatagcatatatatatagcatatatgtagcatatatatagcatatatatatagcatatatgtagcatatatatatagcatatatatatagcatatatgtagcatatatatatagcatatatatagcatataaatagcatatatatagcatatatatggcatatatatggcatatatatagcatatatatggcatatatatggcatatatatggcatatatatagcatatgtatatatagctatatatatatagcatatatatagcatatatatatatagactttcatttgcatgcattgttttacttaatgcttacaaacatgcatttctcacagagcaatttttatttgacattgaatattcccaatatttgtataataagccttaatcagccagtcagaacccttgacctctaacatttatgcagcattcagtgagttacttaatctttctaagtttcagttgccactttatacagagaagcacaggaattagaatcatatagaatgtctagagaaccttgcagtgttaaaacgttcattcgttcagcaaatatttctgattatcttctatgtactagtatctgactgcaacaatgcacacaacagcctatgtttctgctctcaaggagttgccattctgttttagagagaatacaattatcaagcaaacatttgaagaagtgagatcatgctatgaagggaataaaatagactagtggtatagacactctagtgaaggtgaaaactatttgttgatagtgtgtttagaaaagtcctcactgagaaggtaatggttgagctaagacctaaacaaaaaattagaaaagccatttgataattggggagatgaggtctggattgtatctgcaaaagtaaaatgtgaaaacaacacagcttatagtttttatgtttgagtagtttttagttttcacagcattattttactttatctttacacccacttttgaaaatgggtaggaaaataatgctgtcattttttttaataagcaaaaagaatcagatgcagaatgatgatgtatgttactggtaccatgaaagtaagttagcaacagagttgaggcacacactttaccttctggccccttattccatctgcttttcgttatagttctatgcatgtttttcagaatgggttcatcatctacacgcttctcgatcttcattttgctgatcatgtttctccatctttttttttttttcatgtttcccctcttaactgaataactgatttagtgatcaaagggcaaaatgtcaagaaccaaatatatcttagagtgacacagctaaaagggatcacaaagctacttgatttaactcttattctatacaaggggaaactgcagcccagagagggaaagtgacttgtccaaagtcatagggttgatcagggcatctattctaatctccagttcccttgactccctgaccattactgtagcaggctgcagagtttgagaaagtgtctcatattttctctcttttctttctctctctctctttctttcttccttcctttctctctctcttttttttaatatggagatacaatcacactaaaactgctgaaactccctttgtagtttgccatcttttattaccctctttctttgccactttttgcacactctctgcatatccatgttttggatttttttttccatttattagcttatattatccaggccaaatttcatttcattatttcctgcccatacttttatagacctttgggtcctaggtattgctcttccttctgtttgtggttagaatgccagcctatctcttggctgctatataattcatgtgacactggattttaccgcctctttcatatcttgagatatcattgaaacccaaaagagaactggctgaaagtcatttagggctttgaacattctgctctgttggctgcattgtcatttataaggattactatctttgcttacaatctttttaagccattcaaattactatactaaatttaaggtgatgtaaatgcatcttcaagttccaattcataagactgtcaaatctctttattaaattttactctaatatgtgctacctttcctatccagatattccatttcttttcaaattcagttaggatagaaaataaaacaatatataagacagatggtgaggcatgatgtctcataggaaaaaaaatatattgtgggacaatttgtgtagaattggattttccccctaatatgtgcttggatttatgctctgacctctttataattaatattttcataaaaatttttacataatactatctgctaaagcagattgaaatcaggtttgggacatcttcagaatcattgataacagagattctaaaactccaaaataactttgttaattcatcatttactgagtatctgctatgagattgacactatcctaagtattcgggatattaattaaagtaagacaagggccagaaatatctgaaaattcaagagctgtacaaaatcattcatttattcacttattcatgtatttttaaacatgacataatatagccaggtagttttcttgaccctaatggaaaagatgcactttgaaacatgcttctattaaacttgtgttggttgtatgggagcagggaacaataataaataaatattttattttttattttatttattttaaataaaataaatatttaaaatagtgaatactacagtaaaggaaataaaacaatatggtatgctactttgcagtggggatggaggattagaatgtgaattaactgcttgttacttgaatatttgaaatgactgctaaataatgaagaggtcatgagaaaagccaagaaagagatattccagaaaatgtgaacatcaagttcaggttcttggatgcttacttaaggaatagatacttgttgtgtcgatagatgtctgtctggatgaatgaatgaatgcatgaatgaatggaaggtagtgagcaaggaggacagtaacagaagatggagggataaagcaggggcttgtaggcctggatacagactttgaactcttccacatgagatgttaagccattgaggagttttagatgaggggcatggcatggcgtagtttacgtttttagaagagcactatagctgttctgaaggagggatagttgggaaacaaatggttgagaaaagagaagcagataggctggttaagtgagaattgcagcagtgatgttggcttgaactagggtggtaatgatagaacaaattagatctattttaaatatcccagggaaaaggagcctataaggtatactgatggactttgtgtggtgttaaagggtgagctgaaaaaaagtaggacagatgactgggaaggttttggtttggtcattgttaagtgatggtgttgtcatttactaaggtggagaaaaagggaatgtggggagaaatcagtatttttgttttagatatgttttttgatgtcttttgatgattttgtgatgcctttaaataggcagatatttagtagagatataattttaggcagttgggactcagagaagaggtcatatctaaggctataaatgtttcagtgattggcacatagaggttttaaaatttttatttagaaactgagacaggatgagaaactgtagataaaaaagaaaaaggggtccccatctaaccctgaagtctggcagcattccatgtagagttagggaaggagaagccctcaaatgagtctgtgggggaggatcccagacaactaggatgacatgatgtcatggaagtcaagagagggaggactgcaagaagacaggagggggctacttctttatatgcttcaaggcagtctagcaagatggggattttgacatcatgctcagctttagcaactttgaggttgatgacgacgttaatgagattgattttggtggagtggtgagtatagaagctagactggagagaaccgataggtgaagtgcaggagacaaagtgaataacactagtttagataacgcaataaattttactgtgaatcatagaaagagagatgtgggataggagaaatagtatttaggagacgtataacagaatgaaaggaggtttgcgtttttattaatttaaaaactttgaatttttcaagaatttttacatttttaaatctttagatgggctatattctattttgctgatttgggagactaatgatgtaggaaatagagggaaatggtttgtaccaaacaagtagtgatgcagaaaagtgagagatgtcatggagctgaagttgctagaactgaatcttaatggaagactcataggcaggaccagcctttcaggctaaggaagtaagggcagatgctctgagatgtgagttctgggaaagaactggatgcatttgacggtggagatgtggttggaactaagaataaataggaaagttggagctagattacaaaaagacttgaaagctagttggggaagttaaaattttgtaggagtctatgaagtatttcaaacaggctgggcacggtggctcatgcctgtaatcccagcattttgggaggtcaaggcaggcggatcacctgaggtcgggagttcgagaccagcctgaccaatgtggagaaaccccgtctctattcaaaatacaaaaaattcgccggcttggtggcgcattcctgtaatcccagctactcaggaggctgaggcaggagaatcacttgaacccacggaggttgcagtgagccaagattgcaccattgcacttcagcctgggcaacaagagcaaaactctgtctcaaaataaataaataaataaataaagtatttcaaacatgaaaatattcatattttagataaatcattcatagattcataagctgctttgtgagaagggattgaggtgaggaagatgcaaagccagttttgagtgtgtaagggctaagtagatagaatatgaggctgtgctataggtgccttccttgatgggcctgagtgtagagttagtgtgataatgtgattacttccagggatgctcttcttttccagtgccttcagtttgttggaggatgcttgattctcacagtgaaacacagggaggaatttctggcccatgtgggtatgtggccaacctttgaaggaactggaaaccaacttaagctcctcagattcaggtctccttcagtagacctaatcagcatctgaagcttgttagcagattcatggttccttaggagccctcactaccctgtcttttgtactctgggcaggctgatctggttgaggaggttaagaagaaaccctggtttgaatagaattaaatgaggtcagcaatgtgggtttgacacgaagcctttgaaagataggctatataaagtcaagatatttctgtcccagaggaaacatatgccaatatatagccacctcccagccccacccaagcttcccctttgtaaaccttcagcaggtaagcactcctgctccccctgttccaagaaactaacgtttaagtacaaagatcacgctttgttgtgtgtgggggtgtttctttttgttgctgtttggaagaattgtgatgtggcataaagactgttgttattgaacccatctctaaataaacagctaaacttaaaatatgctactttttttctggcctttaaagatctttttgaaaagtaatcgttggactaaaagagaatatcataatgccaatcactgttttattagctagaaatagaaatagatgctaatttctcaaaagctgtcctatctttatttgcaagaaatttagaaagacaggtgaatccactcatcgtttggaaggaggttcatttcagaagagtgcacattcaaaatctttgctttctccttgagctctaaattagtgactaagaactctcatctcctcatctacaggtagttttgtgtatgtttggttttctttttggctcatcaatgggctggaagattagtaacctcaatagcttcccagactagttatatttagccaataccagtgaatgttacaaaaagtgaaatcagagatttccaaaagtaatattgagacttacttaagggtaatcaactattttgctcccagaattatatattgaaaagtgggccgggcatggtggctcacacctgtaatcccagcactttgggaggctgaacggggggtggatcacctgaggttaagagttcgagaccagcctgaccaacatggtgaaaccccgtttctactaaaaatacaaaaattagccggatgtggtggcgggtgcctgtaatcccagctactcaggaggctgaggcaggagaattgctagaacccaagaggaagaggttgcagtgagccaagatcgcaccattgcattccagcctgggcaacagagcgagactcggtctcaaaaaaaaaaaaaaaaagaaaagaaaagaaaaatttcaaagtctcctcatttctgaaggataatttcgatttatttaacatagtattgcaatcttttttaaatctagcttcagatcagtttcttactgtattagttccaggatttactgcattcccttactcaagtattggtcaaagtttatcctttactcagacacctctctttacatgctcaaactatttataccctctaagatgtttctcccaaatcattttgtcaaggaagccttctctcattttcccaagaagtattgataggaggagggcctgtcctgattcattaacgtatttccagcaccagcacaacaagaagcagatgttagtatattgattaaatgaatgtatagacttctccagttctcatctactgattagaagatattttagctggggattgcaatagccctcactcctaaaatctccagaaagctttggtagctcttatctgttgctcattcattgctgaaataatcaaaaatgaattactgggttcttagtgttagctgggcatctcagaaatgtttgagaagcaatcccttggggtttaattttgaaaactgcaatcccaaggtttgaggaaattttatagtgaagctgataaatcttttagaaaaagtgtgacataccctataagaaggtgcctctgttttgatgaaatctggtttgtagtactatcatggtatggtcagtaatagcattacaaataagtacacaagcacctagttagtttagtctatgtataatctggtaataaatgaactcaaagataaatccgttgttacctttcatttgttgtttatctagtcatatattcctcaatcactggtttggtgtcccctttactctgagcactgttatgggttggaaatactaccgtgaaggactccacaattctgttcgcagagatcttgtctgcctgataaggaaacagacccacagacagacagtgaggaaactgtgatggaagaaatctaggaactgtgataacacaggaatgacactcagctagggtggggtcaggaaaaagggatgaggaatagagaagacttgcaaaggagatgctctagatgaaccttgaagaaccagtgggagttagcaaagtgaaaaatggaaagcacatttcaggcagagaaaaacaacctttgtaagggtgtggagaaatgaaacggaattgttcgtgtggaatgtgcatgaagaggacagtttgtggatggtcttgtatgccaagctaaggaaaatgatgttttttaaaattatttttatgtgtttattttttttttgagacagagtcttgctctgtcacccaggctggagtgcagtggcgtgatctcagctcactgcaacctccacctcccatgttcaactgattctcctgcctcagcctcctgtgtagctgggattacaggcatacaccaccatgcctggctaatttttgtattttttgtagacacagggtttcaccatgttagccaggctggtcttgaactcctgacctcggatgatctgcctgcctcaacctcccaaagtgctgggattacaggcatgagccaccatgtctggcagaaaatgaccttctataagtagtggggatctatcaaaggaggggcatggtaagatttgtatgtcaggtagaagacttatagccaaaataccttaaattatcccactatcctagagaatacacattatctcaggccatgtttgaagaacacattgacttcagttagcttttacagtaaccgataacttatgactatctgttcaacgttttgaaactgatgagagtcaatgtgaaggcaagtttccttgtgaaaattatccctaatatcttgtactgagaagacacgaataatttaatttcttcctcccttctccagctctgacctctttaacctctttaggtatttctgtcacttattcacctgagtgattctagtgacatcataaattcccaaagtttctaattcagctaagttaattattgtccaccaattgtgttgaaatcattccaatgtaagtcaatatattcttttctttaggttgttacttttttcttttgtttgtttacttgcttccttggcatttatattgaaaatagctcatgcatcctctttaatcatgtctatccttcaagataccttagggtctagggctgggtagagaaaagtagaatctctaattaagaagacttcttctccaactccaacctcattatcatcattgttaagaatagaccctgtgtctttaagaccagtattattttcccatctcagtctgttatgctatttgatcatcctcagaaccttgttgagaaagtctaaaatgtaattttgttttcattttatatatggggaaactgaggcatagggaggtgaaataccatgtccaagattaaccaataatcagagatagatcaagagcttgaatccaggatttctgacttcaaggataagaactcttaacaatagctctaacctgagcctttgcttcaaggtaaactaatatcattttcctaagatttggttttccaagctttcaaatgggaataacgatctctgtgcatcttaagtagtgtcctgcagacatgcctcaggaactcagggacatggcatttcaccttgatgctccagataaatgaaaataagtcagctggtggcagtatcaactatgtctgtccacttacaccaagtccatctgcctcgggctcttgaagctgaactcatttcttccaaaaggaaaagaaagtttctggcatatgaaatctcaactggagaagacagactttgctaatggcacctacccacgtcaagtctcctagctggatagaacagatttctaaatgtgtcaccacatgaaagggaatgaatctgaagtgaggaattccctgatatgaggggaagatggcgtgggatggagaaatcagaatgcccagtgcaatcccactatcagctagtcaccacctggcttacagctccatttccttctccctaagacatagtctaaagaaaatagtcaaagggtacagagtttaaactgtatttggttgagagtatatacatcggggatgccagattttggtcattcgttcattcaacaaatatttattgaaagtgtattatgttttcaggatgtgtatgtgtataaaagtgtgtatgtgtgcacatgaatgtgtatgtctgtgtataattttcttagtatccctcacagtgaaatttactgtattattatcaatgctacctagctactacacggaagttatttgaccttggtattgacttcagactcttttcactacaacctgctcagcatctagcagaaagtatttaaggagcaccaagtaaattgatgtaatgaaaacaagaccagtttgttttagtgttttgttgttgctgtctttgttttttgcggccgcacatttgtattccattcctcactctgttctcttctgtgcttggggcagagggagtagagagggagagagaattccccagacacgggctggcagatgtagctgaagggcccccgggacactaatagcaacagaaactgaatagctgtgtccaaggatgttattttaaaaagagactcacaatagctttgtcagcagaatcttggagaagaaactgcatcttctgtctctctttctctctctctcccttgctttctttttaactccatcttatttttctgtcttttaactcttcctctacgtatctatatatcatctattacttatcgacctgcctgtatacctgtttacctacctgtgtctatttctacctttcctccattctcaggttctgctgattcctagcagacaaatttattgtggtctttaacataatcaggaagaaattagcctttagaagaactaaaatctaaccccaatttctgtcattccgagaggttttttgctaaggaaattaagtcactttagagactagatcttacccttacagagaacataatcttaccctatttttctttacattggaggagaagaaagtgataccaagaattaggcacccctatgatcttatttccaagaggttgttttcgtcattctgtagctgtggcatgtagggagaagatttctctgctaggtgtaaaaaggccagtcttctacttcttgctctgctaccacctgtctctgtgacctggaagcagatggcttcttcctcaagctcacagttttccattagataaaatggatgaaggggccagcattatacccacaatcatctgaaatcactgcaacaacgctgggtaaatatcattacctccatttttttttttttttcagatgaggaaaatgaagttcagagaggttaggttattttatttatgtcctctttgtagtgcttataggaagcagaattcagatttgtacctacttctgcctgatgtcaaaacccttgctcttttcagttctctgtattgggtttctgaagagtaaagtctggatttatggctggtcactcttggattgggcctaggttatacgatatgtagagtggccacattcacatgaggttggagctactgagaagtactgagcctgtattctttctatattgaactgccatgaatgctactggtcacttataatgaattgatttattctgtttcttttgctcattctttctttcttttctctttctgtttttcttttgttttgttttgttttgtttttttgtttttttcagacagggtcttgctctgtcacccaggctggagtgcagtggtgtgatcactactcactgcagctctgacctactgggctcaataaatcctcccacctcagcctcatgagtagctgggactacagatgtgcaccactgtgcccagctaacttttgtatgttttggagagacagggtctcatcatgttgctcaggctcatctgattgctcaagcaatctgcctgccttggctctccccaaagtgctgggattacaggcatgagccactgtgcccggccctatttgggctcttttgatagtatttcactgggtaaactgttggcagaaataaacaagggattttgcagcttggaagaagttcagcattctggtgcccctgaatccaatgactcttcttttcagatacttagcatcatagaaatctgtcttgtttctccttggcaggggctctttctagctaggggaaagttgcttgaatgtgtttcaagtgagcactgatttcacaagctgatttaattcctccacttagaagcaaatcaacccattaaaagaagagtattttttttttctctcgatgattattctaggatgtacaaagcacatttatgttcatttcctattagagttctatggttatcctgagaggttttcctggttgggactataatttctacattacagactggggacagggggaagaggccaagaagtaagtgaagccagttgtgcaaagatacatagctaatgtaagggacagaaaccaaacccttgtctttggccctaaattcagtgccctctccagagctccactctattattttgtggaagaatgttctaaatcaagcagaagccttagggtgaccatatatcctgatttgcctgagaaattcagattttcccaggatatgttccttttgtctggacataatttttaatagcaccactatcattttcaaagtgctctggtttggatgataaattatatagtaaccctaagacactggctagcaactatatttcaaggagctcagaatctttcaaaagtcctgcaacatgtagacttaatagcagcacagtgtgataagtgttaagatagaaatctttataaaataggcacccacacaggaggtggtatttagctttgcctagaaaagttgggaaaatagcacagaagagctgatgctagaattagtaaaaaggtggacaaggtgatctcttttggttggccacattgaggtttttccttgtattgttctgtgttgaaatatcaagaaacatgcataggtcacacctacttagaaggcatcctactgctagctttgtgcttctgttatccttgtccttgcagctaagtgagaatcattgcagccggctgcagctttaaatcattccaaacagaagcacttgctgtggtctagatgacatgggagcttgagaattcacttggtctttaactaaaactcctagggtatccgacaagcccttagaagcctatagcattagacaggaagggttcttggtgtctcaatagtgtaacctctttctctgctctgatggttgagcccagtgtggcaaggagacttattcaaattaacagagcaatttggtttcagagctggaattgaagccaatgtcccttgtaaatcagttcatgttttaaagcaaaactgaaatcctctttggagttaaacaacccccagtttgcctctgtgaaattcttttgtgtcaaataatgcactcagaacttggaaagtgaatgcctgagttggagacccagatcaggtattaacacactgtgtgatcttgggcaagttattaaagatgtatggaatctcagtttcctcatctggaagaataatatcttccacatgaagtttttatgaggaatatttcgaataatgaaggtgaaagtgtttgtgaactttttattacagtatagacacacaacacaaggtctaccttctttatatattttaaatgtaaagtacaatattgttaactataagcacactattttacagcagattcctataactttttcatgttgcacaattgaaaccacatactcactgaaaagcaactctccatttcctcctcccccgagatcctggaaaccaccattttactttctacttctatgagcttccctactttacatgccatctataagtcgaatcatgcagtatttgtctttctgtgactggattatttcccttaacatggtggcctccacgtttcctataacatggttatctccttgaacatggttcatccatgttgttgcagatgacagaatttccttctttttttttcaagactgagtaatagtccatcgtgactaatgtgatgggcttgacagtaccaatggttttggtggtctgactctgcagctgctgatgattgctgaggccaaagaacaaatatttatttattctctccctttctatgtcaatcttttgcagatgaacccagccggtgctatttccatgatggtgatggggtatgtgaggagtttgaacaaaaaaccagcattaaggactgtggtgtctacacgccccagggattcctggatcagtgggcatccaatgcttcagtatctcatcaagaccagcaatgcccaggctgggtcatcatcggacagccagcagcatcccaggtaagatcctaaccatgtgtggcatttcctgcagacattcaaagtctccgctatgccccacaaggctactcacctctaaggcagtgtcattggctatagccacttgagcatatctttattaaatgtactgttagggcttcatgaataccatttgtaaaagattagatctggaattgttagggcagggaacattgtatgatagggtaatgactgtcctcctatttccttgcctgtaataactaatatttggagaaagaactccattttgcatatatcatgtatttcaatgaggtaagaatgaatttatattggaagtcccactttttagggggcgccaagctgtgtactacttgaattaacagtaattatacagtaatttgctatgtggccttagactagttctcccacctctctgggccctatttttcgactcatccttaaaataaagagtagttgagcttgttgatctccaagggccttcccaattctaagaagctgtgactcatgcctcagtcccctaatgcactatttatgtgccacagttcttccccaagggactgacagcttagtccagggagtgagagttttggggccactagtgcttgtatgattctagagatggtcatgctgtcccgagagccccctttccaattatcctaccaaggaagcacctgccttccccgagactcaaatttcccagagacacgactcagtgcttctggctgcctggcctagtggcctttcagagaccagcctgcctcctggccttgcagatgagctgctattcccaggcattcctttccaatattgctttcttgatttaggtttagtcgggtagccctggcttctagatgaaagaaagatatgaccttcctctggggtcaagtgaagaatcactgggtgaggtacagaataggactacctcatttttagttgttgcctgtatttgattatttcttcattcactttttgtttatgtttacatcactaaagcctttattcatttgcatttatttttgaatgccctcaggagagtggaaacaaatggtaacatggcatttcctgatgcttaacaatgtatagtgccagcctgctgaatgaatgaatgaatgaatgagtgcacagatagatgaatggctagggttcatcctccccctgtgccacgtctgtacttggtggaatcatctgtgtggttgcatttatcatactgaactctgaagtatctatttgtctgtctggctcccccattaggctgctggttctttgagaacaagtttcagtttattcatctttgtcctctcatgttcaagcaaaggctagataggtgcccagcaaatgtgtgtttaattgactgtagatacacacacatacacatacatacatcccattgccacatgcaaatgaacgacactgacagaaaacactcacgcattgcctctctatcacatagaatgtcctgcttcagaaacaacagtgctggggccagcaagagaacaaggaatccaaattcaacactagcatccagttcttagaaatgttttaaaaacaaccttcaaacaagagaattattaacacactcagaacctcccatgaggaagagttgaggtagcagctgtgcttaaaaatcacccaaatgttattgcgactaatgtgagaaaaggagagaaagaattttccagtcttagcatttgaaaagaagcttcatggggcaattattccaatcttgtaagggggggctgtcaggaattactggtgattatctcttcctaaacaaaaatccaatttaaaaaatcattataaatactagctcttcgatctacaaagaggagatgaggaaacaaaatcatcctattgaattattcattgtaaccaattttattttaatgaaatcgactaggttccattactctgggcttggacataatctttgttacaaggagatttcagctgtaactaaatttgccataatgagatcagctcactggagaatacagggtcggggagggaatatgtgtgcaggctgggtgcagggccaggaagagggcagcagaacaaaagtctcctgaattcctcatctgaaagcaagtacctagaagtcattcacaaacacacacacacacacaccctaccaccaccacacacagaggcacaggcacacgcatacacaagtacgtgggcacacagacacacacacacacacacacacacacacacacacacacacacggagtctgcataattagaggtaaaggctattcctgaagtgtaaacgtaccttccttccaacaacagagaatgaggaggaagtataattgtgctcttcattaccttgtacagtgattagaagagattggtagttaattttcaccctgtcagggcttccagtgaagatgttgatagcttgagaggaggagctgggaggctcttagaagttgggcttaggaagaagatgggaattgtatcatgtgcttctcactttccccccagatgctcatactctccctcttctctctctctctctcacacacacacacacacacatacatacacaaatttacacaccaaaaggccctgtaggagcatgggagtaccaaagcagatagaagagaatagcaggaaagaaatagtagttatcaaggtccaccaggcactggacacatgtatgcacattacagccaatccccttgtcattcttcaaggtaggaattgttgtctaccttggagaaactgaggaacacagtggcttcactataagttacatggtccataagggaagaatctaggattagaagaatctcatggaagatgaatgacagtgggtccttgggaacatgaggtcacattcaaaagttggaagtggctggattcctggaaaacttcactacaaaacaggcagaaagactcctagatggatagatctcagcattgagtgtcactctgcagacctcatgaggtacttcagttctccttgaacaaacttatagtcactgcccataccttcaaattcaggctgttcccattccctgacaaggtggccctgttccatgatgccctggagttccctaggacactccattaacttagggaatgatgaaataacctagtcattcccatttcctctttacaattcagtttggtcccactttctgtctttccctgatgcaataaaaatgataaatgcgaaggtgtttattggagttatgtgcctagttctgtgctagagcctgtggaagaaaccaaagaactgaaatacccagcctctgacctagtcactgtacaagagttaggagtgagaattctatcaaaggcacattcttatcacaataagtctgcaggatctctatgactactgcaaagaaacaacatgcattgtgctatatggcttgagaatattgattaaaacttcagttttgatgttgtaaaagcctgccatatctaatggtttccagtgtttctcgttcattcttttcaaacatgattcccaaatttggttagggcaaagctaaccctgaacattgagtctcatatccaaatcttatcagaagtatcaaaacttcctggttgtgcaaattgggttgaacatcctataataagagacattctttggatattttggccatgcaccttcctggcccagctggaatcaagaagttcctgagacagaaaaaaatggaaattaaccgaaaaaatcaagttatctctcttctgggaacctcagaacctggtttggtttaagtgcttgcaaatatcttgtattgttcttatttggtctccatgtttcacatttctctaatgctttacacaaaaggatgccaaaatgagatgttgatattccttccttttaccccggcctccagcatttctaccaaagtctgtttcctcctatccaaacaggcacctccctcctttgcagtggcctgaggaggaaatggaaatactaagactatctggaatttacagtgctctcctaagggattacagaccttcagtcaaccaaccaatttatttccttaatcctttgagggtaaaacttagactaagcatttcaaggggagtagtttgagggccaaagtaaagaaaacttttcaaagaatgagaactatccacagtgagatggagtgccttgtgatataagaagttccccaacataaggcattcaggctggacagctgactgaacagaagattcctgcactagaaggcaggtgagacctaggtatgcctcttttctttgtaattgattctctgactttatgtcccattaacccacgattgggtatattagtccttggccacttcattttgagttgctattatcattccttggcccatccataatacttcatgcctctactagaatacaaaccaggccgggcacggtggctcacgcttgtaattccagcgctttgggaggctgaggcgggcggatcacctgaggtcaggagtttgaggccagcctgaccaacatggtgaaaccccgtctctactaaaaatacaaaattgagtcggttgtggtggcaggcacctgtaatcccagctacttgggaagctgaggcaggagaatcgcttgaacccggttcaagcggttgcagtgagccgagacggtgccattacattccagccttggtgatgagagggaaaatccatctcaagaaaaataaaaataaaataaaatacaaaccatactataccttgtaatataacaatttatacattaatttatttattcacttgattgaacagaaatatatttgagtcctgcactgaggaatgtgagagagagagagagagcatggccgttaatgaggtgaagtagaaatcatgcagatctggctctgctctcttaaattccattctgacatggaaaccttgagtaagttactcttctgggaatcttagtgtcctgtagaaaatgagaatgataacatctacctggtagaaattaagatgaatgatatctacctggtagaaatgaaggatgcagagaaaacactctgtgctgggtttgttaacttgatgggtagttcaaatgttaattctctgtcttgttcatgtcaggtttccttctttgcactccccccaaagctggctctagggacccacacagaacagaagctcagtcaacattttgttgaattaaacacagttgcgtcagcaaacgtttgctgcatcctcagaactgcagcaggcactttgagaagcttcagagaagtactggttctttttctgccttcataaagcttaccatgtcatcagaagggtgttttcaactagaaatagtagccaaagacccaagagtgagagtgtaagatctagagggagtttccccgaggaagaaaccacactgctatcagcttactcagccagtagtgatgagagccagtgtgtaagatagaaaagtcctttgcccactttcagaagatcctggacaaattataaaaatagcatttatcaacttcttccaggctttccaccaaatttcacgaatcctactaaagctactacaaaaataggaatcactgttttcattttacagattaggacacaaaggctcagagagcagagtaacttgcttcagggctcatctctataaggggcagaaccaagatgcaggccactgtgttcataatagaaatacagctacaggaccaggcagctcaagcctgctccaatgactgacacatgagaacaagctagaagagctagtgtcttttgcatcttttaatatgtggtacgtatttaaggaacaccgggaaagtgggcattccctctctctaatacccaaaatactgccctacaatttttgcctgctgctaagatctccatcttttggcccccattctttcacccattgccctttccagagagttttctaaaatgtgtgtatggaaataagagagacacataagtgttgtaaattgccaacccttgcatgtaaaaattatttcttaaattttggaatgtctgcttaattatagtagggatatggggagaaaaaaataataaatgcacaaataggaagaagaaactttgctcaatttacagttttgtcacaagctatgtgctatacataggaaaccttaaaatgtcagtgaaagggaattgtaagatgtgcatattttctttctttttttctttttttttttggcaaagtctcactccgtcctccaggctgaagtgcggtggcacaatctcggctcactgcagcctccacctcccaggttcaagtggtcctcctgcctcagcctcccaagtagctgggattacaagcctatgccactatgcccagctaatttttgtatttttagtagagatggggtttcaccatgttggtcaggctggtctcaaacttctaaccttaagtgatccatcttcctcagcctcccaaagtgctgggattacaggtgtgacccactgcgcccagccagatgtgcatattttctgatggctgccaagtctgaggcaggaggggagaagccattcatctgtgtcttcttcatccttgtctccacagcaagggactagatacccactagggtattgtatggatacaaggataagaaatctttccacgtacacttatgatgcagtgtaggaagtgctcagagaggcggactgagaggaggtcagggagaagtgattgctgagtttcaactaagaggataagctggaggacaggagagggaggacgggagagggaggaaagaatcacataatgggggctgcgaggggtatatccaaaaaaaggtaaataatagatgaaggggaagtcaagagagatgagctaggaaacatggttaggaaaatcctgccaatgcttggaacttgacattatcctgagggcaatggggagtttttctgagtttttcagcagggggctaacatgtttggatcattgaaagaagaacattgacaagtgttgaacacttcttacatgccaggccctgtattattttgcatagatttcagaacaaccctgctgagaattcttaatattcctctctcaaaatgaagaaactgagtctcagggagatgaatcaccccacccatggtactctttcttctgttttcttttcttataccaggatactggtattgcattaaaacagcctcacttggaaattctgcattgataagcaattctgcaatgctaattagagtgtgctatttgcaaagggcaggaagaaatcctgtgctctatacccaatgccgaagtcacttctaaggggctctctgccccttccttgcctgctctgcctgctatggccttcaccaaagcattcatctcctctcattagtgaaatgagagagcctttgccaatggtggtggaaggaggaaaggcgaagggaacatgctgaaatttcagagacaattccaagcagttttcccaaatacccaaaggatctgctttctcctggtggtttctgaataatttttcaagagcacgtgtgcaagtcatctaaggagacagaacagaaagtaccatggtctagttcagcctgtcccatggtgtggggcaccaaaaaaatccctccaggaaagtaaaaatcagagcctgcctcagaaaggagcccactgagttggtcactataaccacccccaaaactttcatggaaaccttggactgtgggagactttaaatctactgaatcttatggggccccagcaaagagatctactagattctgctcctggctctctcttctattcatcctttggtcatttaccctttcaatatctgttcaaatctacaaaagtctagacactctggccctaggatttggactgaaaaactctgagtgactggagctttataaaaaatgagatctaggatcagttcaacctgattttcagttctagagtccaccacttactagctgtgagactttaagcaagtcagttctctttgcccccaccccagtttttcatctgtaatataggagtaataacatctccatggcaggtatttgtcaaggatgagacagttgatctagaaatacagttttccttctggtagcaaccgacaaagttttaaagaaacacttctgtctgcctgtgaagttttggcaactgaggaacaaatcgaattaggaacaacatgtggactttttttttttttttttttttctaacagaatagtatttggggcatagaaatttaaccagagagagactttgagagtctcttggtcttacttcacttaattaagacttggttttgattaaacaacttccctgaacctctcaatcccatccgttataaaatgattctggtatttggattcaaaatcaacagaatcttgtgaatcttctgggtccaaagcatcattttcaacatgaggttgaacaaagcaaccactgctctcaggcagtaagttatgtgccatggaggaaggaagacaccaaaatagcttctttcgataagaaaagacaaagcttgcaaagtgctgtgatatgtggacaaatggaattaaccttagaggttaacctttgaggaggaagggcgaacctgaataaagtgacaggttatgtagaaagtgatttttctttccacttgggcatttgggggaagctttaaaaaacattgtagtgtagccatattgtttcacagaggaagcataagctttaaagccagaaagacctgacttgggtactgtttgttaccagctgtctgatgcctggcgaatgatttcagttttctgagcctcaattgtcctcatcttcacatgatcctgctgtcattctgtgagatggtatgaggatccaatgagctaacatatataaagtgtataatacgtggctacgtcttgcgaggcatctaattcttgtcagttcacatccctactaaactacattatccctgagcaaattgaatctggagaaggaacaaaaatgtgtaagagaggaaagcaaggaagggatgggtttggcatttgtaggcatacaacaaacacatattgattgatcagggaaggtgccacgtggaacggtgagatcctgctttgaatagcgagtcttcatttttcagttgacacttgactcttgacttgaagcccaagaataagcaaggctttgtggtttggggctgcatctactggttctccatgtagactagataaaaccctgccaaccccttccatggcccatctaggaagattccttggcctctgtcttcctttttcttccaaacctggcctacccctatctcattaccttcattctccacatcctctttagcttcaggaccagaaacctttcttttatccctgtcatttgttctggctcccttaaaacccttctttgttcttgtctttcattttcttttcttttctttctttctttttttttttttttttgttattgttttgttttaagtggggtcaccagcattcagccagcatggcctttgctgtgtaatttagtttcatgttctgtacccaagaaacatgtaaaaaatgtaaacagcgttcactctcctgggctgtaatgcacttaggaagcaatagccagttgagcttgctgagcctgctgctttggcggtattgaattttgtccctaaaaccacatactcatttctctaagtctgaaagtaaactttctcaagccagacccaaaggatggggttttgaggtgagttagagtttggctgtgcacaagattttgtttttatttttgtacacacaaatgtgttcatttgtttttgtttgtctttcaagtcccctcgtctctactctctattcctccccactctctattccttcccatccttactttgataaattagactgggtatgttacctgtagaatgagaccagaaagggccttctgcctcctcttaagaaactccaaccaggccaggcgtggtggctcacgcctgtaatcccagcactttgggaggccagggcaggcggatcacaaggtcaggagatggagaccatcctggctaacacggtgaaacctcatctctactaaaaacacaaaaaattagctgggcgtggtggtgggtacctgtagtcccagctactcgggaggctgaggcagaagaatggcgtgaacccgggaggcagagcttgcagtgagcggagattgggccactgcacaccagcctaggtgacagagtgagactccatctcaaaaaaaaaaaaaaaaaaagaaactccaaccatgattttcttaaaccctgattaattcttcagccagatccaagcaccagagcaccctgggtacatttgtacatgtttgttttccagggagaaatgggcccagagaggcccatgagagatgtccctgctgagaggttccctgtgccagggcagtccaaaaaagttgtccctggggctcctgcccaccccagaatccttttccaaacatgactcatatgtgcaggtggtgaaaggggacacttcggtgatgtctacatttctctccttcctggaagagaggcccctggggaagtcacaggtttgggagagatctggtctactggcaagatactgctttcagagatgcagatgccacctgggtaatgcccatgtctgcagtgcaactgactggtggcaaggggtccaggaagagaatatcaatttaaagcaacgggaaggaggagataaactgacatgcaccagggagctacggtcaggggtttatgtttcagagagagcaaaattgtatcagtgttcacaggccaggctccagactatctgtccagtagaaacttccatgatgatgaaaatgttctacatatgaatgtcctgttcagtagcctctagccacctatgatattaagccctaggaatgtggttcatgaaactgaggaactaattggtttaattttaattcgttaaatttaaatagcctatttgtgggcattgggttcccctactggacagagcaggtctagagtacttcacatgccagggctgctacttgcattgagatctcgagcaacttaattagcctctctgtgccttagtcctctcatctgtaaaattaaataattaaggggagatggtgagaattccatgggatagcacgcttaaagcacttaggacagtgcttggaatagagtaagtactacctaaattcattcagttctgtcattgcatcgaatcttttttttttttttttttttttttttttttgagatggagtctcactctttcgccaggctggagtatagtggtgcaatcttggctcactgcagcctccacctcccaggtttttcaagcgtcctgcctcaacctcccaagtagctgggactacaggcacacaccaccacatccaactaatttttgtatttttagtagagacagggtttcaccatgttggccaggatggtctcgatctcctgatctcgtgatccacctgcctcagcctcccaaagtgctgggattacaggtgtgagccaccacacccggtctctccagagatttttaaaatgacatttctctttcccagagtgagatatgacatactaatctttttgtaactcaatgtcttaaattttttaagtctgcataaattctcactggaggacttttgcttttggatcatattctccgtattcacaagaaatattggtctcagtgatttctcacctgtgaagctctctattttgttccccatggcctataaactccaaaagtcttagcagacaaggccatgcacaatctctacctttgctttacagactattgcctaaggggcacgttccaggcagtatggaccaacttgcaatttccagatatatcttggggtttccttttctcctgcctggaaacaccatcatttgctcctcaaccttcttagggcttaattatcctacagggtttagctcaagtggctcctcttccatatccctcccctgacaacctcagcccatgagcagcctccctcttccatgtacagaatacttctggaattatcagacaggcttgagcacaagctgactttcagtgtgcattgcttgtgtccacagcttttcataccaaatgaccggttagcagctaacgatttggccctcatcttatgcctttaggtatttcctgtgcccagcacaggacctgctgtgtggacaatactcagaaaatggactcattaaatgatgttgttgggaacaatagctgctgggtgttacctcttttatgattggattaaatttataaatcggtgtctacaagtgattcccttatgtttccggattacagcctcctgttaataccataggtgatcaaagcaggcagggccttctgaaatcccctgtttcatcccttcacattacaaaggagataagtgctactgtgtgaattgggggaggaagaggtcccgaaaacccatcctgaacccagacctcatgttctttctgctactctgtgcctccataatctatcctcacccccggaatgttcactgcacagtgagaagggttgtttggtaactgtttttgtgtgcttactcctgtgtgttccagcatcaagaacagggcctggcatatagaatttcatgataaatactgataaataaatgtttttttctctgctaacagctttgggcaaaaagtaggaaacagcttctggaggctgagcgccaggaaggaagctctaccctttgcttcttgtttttgcaggaaagattggggtctaagcaattttcctgtgattggcttcctacagagatggatggaaatctaagggtcttcctttctgacttgagaatgtggttcaccttcagagagatctcccaatacaaggcccagcacaggagggtgtgaaggagtaagaggaagaaagatgggaggaagaagaggtagaggtaaaaggaaagaaggaatatagaatgaagagacagagaaaaaggaaggactacacaataacaacaaataccagtaataaccataatgtaatagtaatcacagaaattgataatgatgagtagagtaaagagaatggcttggctgtcagagtgattacattatgtagagaactctacactgttttttgtacatttaaacctgtcaaccactgtatgaggtaactactgtaattaagactcacaaaggttaggtcacttacccaagttctacaggtagcccagtggtagaacagggaagtctagaatttgaaaccagaaccatgtccctctacagccaggaagaaagaagcagcaagtgatggaggaaaatgtcaattttgtatttttagtgagtagggtgtatctaaatatttgcatgtgcaagagctctttgaatcctcacaatgctacaacataggtaccatcatctcattctgcagtggaagatattagagtttatgaagggttcaaggccatgttgtcagtgaatggcagaagctgaaattccaactcacattcctttgatttaaaatgcatgtgtcttctggtgcttagtggaagattcagggaagtggcaggtgcaggggttgttgagaagttcacattgtggatcccagattctcaggcactgcatctcagaacagctgcttcaacaccctgcgtttgtgcagatgtctgttgccctggccaaggctgccactagggaaaagcatcactctggaaggtccttgttcctcagagaaccctgctgatagagtggtggacatataagtcaacagtgtccattgcacctgtggtggacaaagctccccggtttgtacatcacagtcactgtttctacctctgaagcctggaggggcaggccagggagaaataccacttttgtctttaaaaatgggagttcttgtttgagttggaaggtctgcaggatgctgttaaaaacataagtgactgctgtccacctgttcctttcatacatcactgcattgcatcctttggagactcttcctaggaaaaatcaagctcgaggcaacctagacaagagtactgcctcctcttcaaaagcaaaaggaagagagcgaatcatgtagtgattcccagcccttactcattgaggctataggaggggatgggaggaccctgaggtctgcagtgagaagcaggactcagagacaatgcactctgcatgatcatcttggcatctagtggggttccctgcaggtaatgtgacttgtacttcaatttcaacacaatctggaacacacagatcttaatttggaaagctgaataacaggagaaagggggaagaggggaggaaacaaaaacaacaacctggaaacttctagttttatgaacttgagaaagtcttgttctttcaagacagatgtttttaagtaaaaaatcattcctctgacctttcttgaataggccgatgcggtcaagactgccattaaccactgttcaactattcataaccaagggtttcggtgaccaggcaccgaacttggatgtgatcatcactttcctgattaacccatgaatgcccagggactttgatttaaaatcaaaggacaaagagaggtgtagaagcttcctaagacatccccctttagtcttaatagctctgagctgagtgatggagatgtccatattttagtgccttactccagggttgtctgtgtttctgaatttcactctagagccagcagagaaagcatttggattaaagctaagtagatttttgttttttatcttcagtgtctaaatctcagtcagtttcaggtttggggctatagagcagaaggcattacccagccctgttttaggattatggtgttttcgtattctggtccagaacttagaagtgtttcagtgctcaacatactgctctagaactgacaatgcctcgggccctgaaataaaattcatgatttttcaggattcttatctggagctggaaatgcctcagaattttctactgctggcaatagctctgtgctcctgtctagagttgagtgttcatcctgactgaagttaacagtgctctcttgatctgatccagagtctacactggttttatattctgatctagaattcatgacatttcattaatttctttcagtacaaatgcaaaaataaagtttaaactacagaaagttagcaatgtatttttttaaataacgtgctcagaactgtgtttgcaacaatattcagcatctcaaacttatccttcacgcctccgctgttgacatcatttgggaaactgggtttgtcatggcttagctgtggccgagtttttctcctctggccattttttttcctccagttcctgctctccagagcccatttgatattaagatcttgcctttcagacctggccttcagatatagattgcctcagcaactcccttctccaagcccctccctcagccttcagagagcttgaacacagaacctaccacatttctctatgagtgtttgcttgcttcgttcttcacctcccacccccatgggaggagaaggaatttttatctttgttgcttttgttcctttggggtccattttcttcatgtggaccatgggaatgaagaacctaacacataaataagtgctaaataaatgttgaatgaatgaatgacagaatgagagagacatagaaacatttgatcctaggctggacagaaaaaaaaaagatgctttcaaaagaaaacagatccctgggagcacccaaaccactgcctctcaccctgtaagaatacaaggaaggttttgcatcccactcttttaaccccgtcagcatcttactcttggaggtagcacatgtgctgtgaagtcacccacggaccatctggctggggatcccgtgttcctcctctgcagcaagagattacgtaaactggacagcagcctccagatgttagcagtttctgctcatttttttcctcccttttcaacaacaataataataattaaaacaaacacaggcctcatcccccacccgcacccctgaaattacaaacaggtgggcccagatgtcctcccccttcccatccaagggcctcctattcttgaggcccagccgccgaccctcagcagggcctgccctgggctgagccggacagtcatgccagctgccctgtggctcaggccacagtctcccgaaaggggaaatggccatgtcatgagaagtctctgtgccagactttccctctccccgcctcccaccccaaagccttggcctccaacttaaatggatgtattttggaggactaggtggcttaagagattagtaatgagatcccaagtctttcactgctgggtcaggagttcataggcgggcctgggcgactagtgaatggcataattagggagacagggagcaggcctgcggagggcccgtgtgaaatgagcccagccaggcctttaatggcagcagttgtcagcagcacaaaaggcggccgccacatccgacactaatcactctcccttgttagaggatttactagctggaggagctcaagccccctgcccatctcctcctcaaaacgggcatctgggaagggactcggcccaatgcctggctgtactgtctgcagaacggggagctgatgccaaccccatggggtagaggtgtgagaactaacatttcatgcaatataaatgagtgactagtgtcattatattaatcagtacttccactgctattgtgaattttctttctccatttgaaaaagggggtggggtgggtgatgaatctccccatcacagtgacataaggatggtgtccatggaggtggaagcatttggatatttatcatcctcaccgttattgtcatcattctcattaagatcagcatgtacactgtgtgggtctcagttttctcatctgcagaatggactgggaataggagatagaactgaagtaacacagacttcaacatccactccgaacaggtgtggccttggcaccttatttattacctctgagcccaggctgtttatctgtaggacaaacaagaaggaggatagtaatactggcttcccgggaatgtggggaatctatgtttggaacataggtgctggacagtaaatgatggcaaagaaaacatgttagctttaccactttcatgaatggtgtcttaggcctctaacataagcttttcccttagaagaaggttgagacatctatctgttgtcccccagaaatcctgaacctgtgtgtatgaaattgaggaatttaatgagtagtctctaagaatcaattctatgattctgaaccatatcatttctaagaaacttagtttccctatctgtaaaaatgttagtatgctgtagggcaatacgtcttatatgatttctatattccctttccattgaaagcctggcttttcctccatgatcatttggtctggccaggggtttgcaccctaaatcccaggatttcagacttgtggggaggtgccagcctgaagggtatgagacccctaaggagtgtgaaatgcctaatgtgttagggacagatccctggagcaacgaggtgctaatcagcccagagctgagccccaaggctggagggcatccaatgccaagttatcttatcagaaagtgtctcctgggtagaggctctgagatctgctgctatttctagaactctgggagggaagaagaagccatctctctgtttcacactctggccctgcacacaggaaatgcttctttccttgattgtctgtctatgccgaataataaatgctcatattgaaagaaacgcaaaccacccctccctttcccctctatctctttaaggcaggcatcaaaggggaaagctgctctggaggcctggggaaagtgataattgtttctaatggttggtaaaagaaagcctggctcccccctctcttttttctgccattgctattaagtgtgtaaaaaggaagtgtgtgtgtatgtgtatgtgtgtgtgtgcctgtgtgttgtgttgtgttgtgtatctgttaaccctcggcttcccttaaagttttctgtgttcattggtcagtttggaattagaggcataagagggaagcagggatagaagtaggaatgaagagaagatctcaggtaggagaggtctatagtgctccgcaggtagtgggagaggccctgaacctgaagttggaagatttgagttgtgtttgttcattatatgcattaactgagatgagacatgtaaagtggtattgttgttatacatttttttttttttttgagacggagtctcactctttcacccaggccggactgcagtagtgctatctcggctcactgcaggctccacctcctggattcactccattttcctgcctcagcctcccgagtagctgggactacaggcgcccaccaccgcacccagctaattttttgtatttttagtagagacagggtttcaccgtgttagccaagatggtctcgatctcctgacctcgtgatccgcccgcctcagcctcccaaagtgctgggattacaggcgtgagccaccgcgcctggccatacattcgcttagcatctaagctggaccttcctctgctcttaatactgaagatagaaaagacaagagctcattcttcccctcagtgagctaatgaccaagttcaagaattgcaaataggattcatcttctaggccagttctgagcaattagagtgactccccatagtgttttgttgagaaggatttagaggcctaccttcagggatgcactatgtaattaatggtgcctgtcctgtgcaatggatgagagaatggtagcactgatgtcacgtgggaatgagtcctggttctcctggtccctttcctgcactacatggttattattatctctaaacattggtctaggccctatagactttgatttctagatctaatgcgtcaccaatcttataaagccttgggaaagccatattagtttaacataggggacatttggtgagccctgcccagtaacctgcattagacactgatgaaaaggaaagagaagtcaggcataggcactgtctttgaagctcatacatggagattcagatggacaaacaagaaaccataatgcaagtgtattacctcaagggtatggaccaagagttattgggaggtcaagccatggagtaagaagagaacagactttgcgtcagacgagcatgagtttgactgctaagccgtggcaggctgatcaatgcctacccaaacctcagagtccttatatctcaattggggataaagatgcttatttcacaagattattaggaaggtaaaatgagataatacacaggcagcacccatactgggcagaccatctttaagagttggtgctggccaggcgcggtgactcacgcctgtaatcctagcactttggtaggccaaggcaggtggatcacctgacgcctggccaacatggtaaaaaccccatctctactaaaaatacaaaaattagctgggtgtggtggcaggagcctgtaatcccagctactcggggggtggaggcaggagaaccgcttgaacctggtaggcagaggttgcagtgagctgagatcgtgccatcgcattccagcctggggtacaataggaagacttagtctcaaaaaaaaaaaaaaaaaaaaaaagagctggtgccctctctcactctcccaggaaagcactgaggagggagaacatcatctgataaaaacagcaaagcctggtttatggaggaggttttatttcacctgggccattctgtgtccaggttccctgaggccctttacagctgtagtcttataggctgtctcccagcaggctttccctcctgtagtcctcaggacccttaagaatcttggaggtttatatcaggaaaccaacttctgtccttcttgcacccttgcaattcttgggaaataacctggcattggaactgcaagcctgaggttaaaatgtggcctaaggagaaatattgagaaacactggctggctgtgtgtgtgtgtgtgtgtgtctgtgtttgtgtgtgttgcacacttgtacatttatgggtactgttagtgtcagtatccatccccgcactcctcctccccattccttttcctattttcttctataaggctcattcgcaggtccctttgggtggaaaaaggaaattggagaggttggactagaggcttgatgagcacttcctccctcccatgattgacaaaagggcatgtaaatctgtaaaatcgaaattcaatggaaacctcatggcatgtcccctgtgtgggaaaataccagagcccccgctccccctcttctccctccgtctccctgcctttgtgtacatcgtgtgtgggtggaagataaactggatttaaaaaaaccctttgaaagcaagacatcgttaactcctctaattgaaagcagtcttctgcaaaggagggggatttggaggcgggtgctggatgtagcggctggcagtgcactgagtggacaagagtctctgggtcctggagccacagagtcctctgtttctgcagacctggaacgcctagtcaccaccagacatcctggcccgtcacagaggagcttactgtatatgttcaagccggtctcttctccctccaccgggctatgtttctccatccatcaaatgtgagaattggagtaagaatttctgaggaccctcccagctcagatatccagtgatcccaaagctctggacaaaggatttccccagctattttgcagcttccaattgcagacacaaaaagaaagaaagagagagagagagagaaaaaaaacacattgctagaaaggctgcagtaaacttttatgttactgttctgattgtctttgcccaaaaaggtgtcttggaaattagccttcagcttcagagaaagggacccataagtctcagaagtcaacaggatgttcacctgctgcacagtgtggctttgtttgtttctttgtttgttttacacttaattttagagtcaacattcttttctgcagcattcacctgagaagctggaaatcaaaagctggcagaatgtcaggactgaaaagccctttggagatgaattcatcttactctgtctttccataaataggaagagtgaaggtcagaaaaagtgagcaattgagtcagttctaggaggcaggtcccttgcctggcaattgcaggctctttctactgtatcactccactccggggcagacctgaaaaggcctgttttggtctgttgaagcagcttctatttcaggagccccagggaaagacaacaagaagtcccaagtccatcttccatgtggctgggattaagaccccgctagcacaaatatatctattctcttatttaaaaatctcatcacagccctgagagacatgtgggcaggctctcttgaagttaacatctatggttaagaatgtgggctaaacttgtgcctggatttcaattttggttctaccgctaactagttgtatgaccctaggtaaattactgggcctcgattttgttatctgtaaaatgcatatcattgtaatacccacctcacagagtcatggtgagcactgcatgatttagtacatacagagtccttaaaacagtgcccagcatagaataggcacccgatacatgttgctgctgctgctactgctgctgttgcctgctgggcccctattatttcctgtgtgctgggaaatctgctgggatttatttgaggataaataaaacatgcttctcaccttggaaatcttcagagtttaaagagatgaggctggactctatacaactataatctaacttgacaagtgctgtaactgaggtataaataaggaactatacggacacataagaaagagcaattaattctgcctggggagtgagtaaaggctttcagaggagggatgatatttgagagtggctttgaaatgcgtgtagtatttcacaaaatgggcaatgcagcggtggtgggcgtgggggttctgggctccagcatcatggagggggagtccacaacatgtgagagaaagagttgtccagcatgaaggaagcaccactgtatagatgccagggaagggagcacagagagcagtgaaattggtggaagctgctgaaaccagctcctgaaaacctttgtaagctgtgtcaagggaaggttccatcctgtggatcatgggcagcatggtgggtggataagtagcagggtggtatggttagtttttctcctttggaaagttaattatggggagcatttttatgaatgaatgtggtgggaccagaagcaaaaagactggtcgttggtgccctttctccaccagaggaagtggaggtttcagttgagtccaagtagcaattgtgttgctttgtaattaagtacgcagaacatggaattctagagatcagtcaactcctagttgtgatatacaactggatttaggaccttgaaaggatttttcaaagcctctgagcctcattttctcaccagagaaaatgcagtggctctaaactcccagactatcagggttaaatgatattgtgactatgaaacccttggtggatattatgactgtgggtgtccttaagctcctggggcccttaaaggtcattccgtgcaaccattcagtacaactgcagagggggaatcggagagtcagagaaatgtccagttaattggtgacagagctggaattaagccaggtcttctactgtccatggacggtatttgaaggaaacacagaatatctctgcagataatggatagtctaagggattctgctaaaatgagtgccccccgcccccaaggccaagtggacaaggggtcacttgcctttcaattcctccaggtgctaggatgaggatgagaagcagtcatctgcccagcttccataaaagacacagggctgggtatcttggagaagagaatggtgttgggcactagaattgccgtctgtcatttctgccatgatttcttgggggaagagatataaatgtcactggagatggttctacacagcaaaaaataggatcaataaggtacagaacataagtgagaaaagtgcactatttctgggagacagaaaaatttgctttttcataaacgtgttgctccttattggctgtatattgccgtgcaagatacctcccttcccttgaccactgcaaaggggaatgatctcagcagataacctattctagtcccatctaactttaaaataagaaagcttataggcattgctacttagaagaaacagtaggagaaagtggatccaggagtctctctctctctctgactgttggagaggactgtccaatggtacataggctttctataaatggaaatgagctgtatgtccatgaagtaatcaagaggcttatgtcatccatcctccaacctgagaggacctaagtgagggtgcttgtcagcccaaccacacctgctctttgcctaggactactatatcaatttatttttcccttcacttgattattttatgtaaaaaatatttaatgtatttatacattaataaatgtaattatttattgttgtcccaggacaacaaagctgtgacctgaagccaccccagggaccaactattttcttggaataagggctggggaagctgcttatagggtcctgctagattgcccaggatgggaaaagaagtaagaaggttttctgccaatgtagacaccattaaatctgtaccaggggttcaaagagtcaaatacattcaggccagtggatcaacattgaatgtcaacattttagtcattcaaagtaataattctttattttttattgtgggaagagcacaccgtgagatctaccctcttaacaaatttttaagtgtatggtacagtattgttcactataggaataatgttttactgcagagtcctagaacttattcatcttgcttaactgaaaccttatgcctattgattagtcactaatcacttttcccttccccatcccctagcaaccaccattcattttgtctttggttctatgaatttgattattttagatacttcatattaagtgagctaatgcagtatttgttttccatgtctggcttatttaacttagcataatgttctcaaagttcattcctcttattgcagattgcagaatttccttttttaaggtcaagtaatattccattgtgtgtatatatcacatattctttatccattcttctgttgatggacatgtaggttgttacatcttggctatcatgaataatactgcaataaacatgggactgggcaggacagaaaaacaggtttgagctccatggaatctctccttatctccttttccatttccctagggaaacccaaagcctagtggttgcctgtgtttctagagcactcttgatgtgttccacaagacagggagcaatgtgaaaggagggaccaggtcttgttcacaccagcatgacagagaggggaaaaagggttactgtgttacttcctgacatctctagggctggaaggctgggaagaaccttggcatcactggaaggatggaaaacagtatggctctgcacggggtataagaaatgtgcagattgggaagggggaaaaggttaagattgggaatgtcaccggagccagtgtcactgaagaaactggaggaggggagatgatgagcgaagaagagcttaggggtgatggtagggagagctaaagaggcccctagaatgcgtgatataactctcctgcatgtctcctcccaaaacattcagtaaagtcaacattgctcagcaatgctttatggagttggatttgcctttttggaaggtgaaaaaaaaaaacacaggcggatgaaaacagagcatccccataaaatcagtcaccttggggatcacacttgtgtccttagtggccaactttgtatcatgggcaaggctcttttgtttgcagttctctgaagcctggcatgccatatgccctcagtaaatggctgctgaatgagcagattcactcaatgtctatgaaagcaggaggcttgtaagggtttgcctctctcttcctctccagcctccctccagttccccaggaacatagattattttgcagatcaactagggctttgggcaaagtttcagctggatttgttcattcttctctgatttgctttgactgtccttggtcaggattgcagccaacttgaaacaaacacaaaacaaaataggaaaacagaagaataaaataacaccagtatattcctttaaaaccctgtctagtgctaatagaactgacaagaggaaatagtatttaagcaataagagggctttgttcatgtcagagaatcctgtagctatgaatgcttcagatgcagagataagacccccaatccagccttcagagatgtgcttcaccaagctctgctgggagacaggcagctaagaacacaaggggaaagaattccaaaatgatacatgtcgaattgctggcctggatttcaaattccatagatagtttatgcaaagtcttgcgctgttgtaaagtgtaacacaatccactggcagatctgcctaaacccggtcccagttgtttttgagaaaaataaataaacttaaaaacgtcttccagcccatttaagtggctatgttctacccttagcctcctcagtgtgaggcttctagagatttgaataactgaagccatcacctaatttgtcagcaatgggataggagattcatggcatgtttcttctcaagaagttaccagtgatattcagagaattaatattgtgctttcagaacctatcaattcctagggccagggtgaggggaactttggcagctaacacatttcaatactttttgatgcttttaaagcaatgaaactcttttcttaaaagaaatattataaggcagctttatatatacaacaggtgagtgcagatgctctgtttgaaatagtagagtggaaactaagtagatcttctctacatcatgatcccctggccaacttcttcatggaatccaaggaatccatggaagacatgtgaaaacctattgtctaacccaacattcggatgtgcaaggtaaactaagggccaaaagacaagacaacttgttcaaaattgcacaccacattttggttatctgtattatccatattgtatttgcaactttactataaatatgaaattacttcaacaaaagttttatttaaaaataaaagtattaatgcttgcaactgcagattataatgcaaccatgtgctttgattagtgtctcattattataaagagaattgagacctggcattttccaagacctcctcgaagccagaaccattgcaagaagtaatggaaagagagacatttgaatttgcacagatttatagatgggattcccaggatggaatatagcatagaatatagatgggattctcagcaagatggtgccaagagtaagaaggatgggctgtcatagaaaattcagacctggtcccgttcattggagcccactgtactgaacacattgttaggaaaactgatgttgatggttttatatctattttcaatggctttctaagctaacagtttggattttttttaatttataaaattacatatgatgatgtaaaccaaaaccacctatgtataacaggtgtatgcactacctgaaattgacaactatacaagtttttcatatttgcttcatgtctctttctgtaagaaaaataacacaccacaaataagattgaggtccttttttttcctgactcccggtgtcatttcctttccttgatacacagaggcaactaccaccctgaatttgatgtatagttctctactctatttttaattcacatgaatcgctgggcaatatatagttttgctttgtgttatttttataaatgacgtcatgatgtacttatccatttgcaccttatttcttttttcctctcaatgttatgttttgcgatctctccatgttgatgtctatgagcttaccattagggcttcctttttatttggctagagaccatactgagccaagtgttaaactatttttatatcatccttgtatatgaatccagtttatttctcttactgttcctttgccataatagaattctgtcatgtgaatatttcatattttatacatttctccaccaacaggagaacatatagactatttccaatcttttcctactatatttattgtagaaatggatattcttaatccttgtatatacttttccattttacttttgtttttgcttgttttaggtgtttatgtttgtttgatcttgttgaggatatatcactttttttcaatagcatatgagatcctcagggctctccaggtcagccgtacttttcggatgagtagaatgcactgacaagacatgaaatgacaggcccaaattcacagggaagttttgtgagagaagccacattagagaccagaggagaagtactaatttgggatgaccttctaccaaagacctcaccgatttcaaggacagctcagctgttcctatcctctttccctcattgcactgttttctgtttatatttatatatacatttgtaattacttgactaatatctgcacacattgcctgctctaagctcttcagcatctgtcttttttatcattttgtcccagagtgtttgacaagcaatagttactcaataaatatcatttgaatgaatgaatgaaccagtaaacgaagtgacatttgaatatgcaagaaacccctaagtttgaagaatcctgcttgtctataaatgtttcctgtttcttttaatactgtttggtatttactatcattgagaatgaatttgtgtgtgtgtgtgtgtgcgtgtgtgtgtaggggtgtgtgtgtgtgtataaagtgatggaactgattttctttgttgatggaaaagcaaatactaatgttttcagtcttttctctgttgtaatatcacttggagcacaatttacagatttgttctaaaatcttctacttgacactcaagattctatgagatctaattgttcaacccacttttctgccactgtccctcagcctcagtagtaaccatttgatcacaacttaaggcgtttgatcaaacctaagcattctgggtttctgctttcctctgagccttgcttctgttccctctgcctgcaatgcccttcctcttatcactgccctactcttccaggcccaaatcaaataacaactcctccaagatttgtctccgtgagaatatctctgtcatctctaccatcaaaatatgttatctattatatccttaaaagtgttgaggattacctcttctacattagaatgtgagctcctggaccagattctggtcttttcatccctgttttttcctgtggtgccaagagcaaaataggtgaacagtaaaggtttgtaaaattgaatttagttgaacttctgacactctctaaaacatgattattttttctttatatttttccaggtgtgtcgaaccaaggtgatagatctcagtgaaggcatttcccagcatgcctggtacccttgcaccatcagctacccatattcccagctggctcagaccactttttggctccgggtaagctgaagctctgagagctttggaatctccagcagcgagccacagaaaacactgactcccatgaccctttctgaagatgggttgtctacctgctgagggtgttaattgtaagaacagggaacaaaacacttagcagtgtgatgcttcctgaaatggaatcctaattgctcatggaatgcccccactgagctcttgttttagcaaagagtttggatacatcttgtctgcctggaacctcctattcattgttcaagatcttttaaaattatcttttcctccttgagccttttactgatcaccagaaaaagaagtgaccattatctcccttcttgtcctgcatgtttggtcgcttgttggatggtacttgtcacatggtattacagaactgtctatggtctttctttctggctaaggattgtggatattactgcattttggcttgtgtgtcactgacctactttgaattcccaaaaatgcaagggccatatcttatttagctttctctcctcaaagccgagtgcagaggttgacatggagaagtgaaagataacagtatgcacctttttttgtgtgtgtgggttttagtgtggaccgggacctttgctacacactttactctcattatcttactagaacctcacaacaatcctatgatgtacctgttgatttttttatttttttttaatccaccatttggaaataatggaacttagacccagagtggcccagccattcactcaatgtcacacagctaagtatgagcagagaaagattgaaattgggtttctgatctcagagcctgtgctcttcactgttaggtttcattgcctcctccttcccatcttggacccctgatgagtagtagcccagttcttaaaaaggaagtttctcctcaaatgcaccccaatgtggctgcctccccaccacatgactgagtgcacatgtgaccctcctacgtcttcacaatttcaggcgtatttttctcaaccaatggttgccgcagctgtcattgtccacctggtgacggatgggacatattatggggaccaaaagcaggagaccatcagcgtgcagctgcttgataccaaagatcagagccacgatctaggtaagcatgctctcttggtcttggcttgctttcagtacctgattccacctctgccccataactagttgtgaggatcagcttagaatgagctcttccttcctttttcccctttcttgcttcttttctatttggcattctggttgccctcaaatcaagatgtggttatgtatccagagaaatcaagatctggcagatacagggataaggggccaatggccaagcactcccttctgccagccacctttaactcagacatcctgtattattccccacagaccccaagaaggagagagactgagtaagagccatttccccgttgtacatgtcaccatctgagacccaaagagaggcactgagagaccccaagtcacatggcaggtcaggaattactagttagattttcagcgtcatagcctattgctttttaccctataaccgggagtgttcatgaccctccaccccaagtggggactgtatcaccagtacaacctctggagaagtttccaatgagaataggaataggaatattgtaggagtagggaggcagttgaggagtcaggttctaccatgggaggacctccctgagtgcagggccaagggggaggacaagggctggacttggccacttgtaccacccctttgaatacccacatgcaccgtggtccagaggagagagcctgaatccagagctgacagctgaggtttggatcctgtccccaccactcactcaccttgagaaggtgagcaatcttcctgtcctcacagcacatcacttagaggctcacttgcttcacatacacagcaaggacaatgatatccaccttagagtcagagtgcactattatttgacactgttgtaaccatgcctagcacaagatcgggccctaagaattcctattgtcgctaagaatttcctatgacaccttcacacttccagtctaccctggagagctctgggcagcctggatactccaagtatttggaatttttggccactactgaagcctggacttcaaagttgtgcccacaccattctgcagagaacgcctttcaaagacctgtatgaagcaagccaggcaaggggtcatttcagggtcagataaaagccaagggagcagggaagattttcttgttttgtttttatgcttgtttatttagttccttttaaaggcaaggggaacctatgaataaggaagagaaagaaaacccctctggacttagcaggattcctgggaaatttccctaagtgagaaacaaatattttcatagttgtcgttgcacagcccagggctctgaggagaggttttttcagcagagtggggaaaagtctggttccacaggagctctttggatcctggtactgatgcctgaggcttttctgtttttcccctccacccccaccatcaccatcttcctcagtctatgacatcccagcattctccgaggcagcttcacctctggaactgagaagggcacctgcttcaggcttccacatgggagatttctccttacatagcaagcccgccaggacatggttaggattataccattttttggatgtgaaaactgagttttaggggctttctggagtcccattattaggaaggggctacaccagcatttaaactcaggtccacccaacaccaaagccaacttctgttttgctaattccatcttgccacagccttcctttccttctgtcccttgtgtatcttttctccctggccctctcccttccttcttggagaatgggaacctgctggctgcattaaaaaaaaaaaaaaaaaaaaaacagggctcttgagtgaggcaagcttgaattctccctagagttttagccatgcctgggctgtgcttctctggaaaaccacccctgcccacgattctcaacctcttctgcagactaagcaagaagtccttccctctcagggctgctcccaggttcacagattacttatgagagtgggctttttaccctgggaagcgcctgttgctatgaattatttccatcacttttccaactgaccaggcaggcagcctgaaactcagcaactcagaccaacaagccctacagcaatgtgggagggaggtgagggcctgggatgcttggctgaggggtggccatttgggggagggagagggactttgggcagtaggtgaaggggaagcttagggggcagggaggcagggggattggaaagatttggaaccaagaaaaaaaggcagacaaagaaactttcaatcagactcaaaatcctcaccggccgcccaatggtgcttttgtgcagtgacatgaaagggtctgggggcttcgggaagggcccgttggggagggcgtgactggccttgagtaatgagcctggcccctcggcccctctgtctcccctgacaggcctccatgtcctgagctgcaggaacaatcccctgattatccctgtggtccatgacctcagccagcccttctaccacagccaggcggtacgtgtgagcttcagttcgcccctggtcgccatctcgggggtggccctccgttccttcgacaactttgaccccgtcaccctgagcagctgccagagaggggagacctacagccctgccgagcagaggtaagggatccgcggcagactcgccctaggccacttgtagccgagtggagacagtgtgattttgaagctgggtagccatttgtgtggatgtaaaaagtctgtgcatttctcccttctccatccatcctctggcctctggccggctctgccttgtggcccatgagtctctgaattcctggggcaattaagggaaacggttgtgtggtgaaaaaagaacctcattcacctggcttgcagcggcagaattgacaatagcttgcaggttgaccctggaaacatcggtttccttctctgagcttcagtgtcctcatctgaacaaaaagaggattagctctcttttatctctgaaatactggaatattctgcttcccgtggcacaagcaggaggcataaccttcctaaccaagggggatagagtgagactggtatttgcatcatcctagttcaccgtgtgtttcagggataggtgaaatctctatgtcttccacaagcctagctcctgtgacctcatgagtggtctaagagcctgtctttcaactgcatgacatcactccctcagtgcttttgaggtgccatctgttaatgcacctagtttggagctacaagcgagtggagtttcctgaaaagaatacgagctttgggaatactcttacttgggtttgaacctccacattaccacttcttgaatgggtgttcttgggcaagtcacttcagttttctgggtcatagttttctattttggaataagcagatgaaatctactccacagggtggttgtgagggttacatgttgcactatagataaaagtattcctgcagactgttaggcactatgcaaacataacatattaaagaagaatatttataaccatcttttgatgatgatggtgctgcttctgtgcacagaattttttgtaaagttcttaaagttagagctggaaaaagcttcagagattatctcatgcatctgacatgtccaaacttctgtgttaccatgtagaatcacagggcccagaaagggaagaacttgcgcagagttgcacagcgtctctcagatttgtttcatgaggtccagaagaagagagagttgtgatttttgtaggctacccaagagtgaggctctctgaaagtcgattcagccttgccctgtatacctgggggcaagaaaaaaaaaagagaagagggggacactagcctttcccacgcccctgttaccacagaggacacaaaaggtggttgcaaaatccacattgtttagtacccactgtctctagcttctgttgtgcaaagtctgtcgtaatctttcagaggcaagagcttcttaaatataattcattgtcttatttcactctaagaggatgttttccacaagcccttgttctccagaccctataaaaataagttaattctcagagcctagggaaaccatgtcaatggaaatccactagaccttttccacaacactttcccatttttaaccagccttcctgaccatccataagttgactgaggcccagactgacttgtttgaattctcgacgaatggtgtctgtgccctaagtaaatagtaggaaatatttaaccactgaaacatatcgattgatacgtatttgttagttctttggttgtaggaggaacattgaatgagggcaaaatgctgccctatatctgactaattatttgaccttggattagtcattccccttctctgggcctcagtttccccatctttaaaatgatgatggtggattgtgtggattctctgaggttcttttcagttctaaatctgtgtttctcaacagttaggaaacatgagagaggacaggaagggacaaacccttgttgagcccttaatagaaaggaacattatcttattttattattgcacctcttgaatagataggaacagtatcttattttattattgcacctcttctgcgaggtatggctcagagaaacagagtgagtgagtcatgaccattcaggcagtaagaggcaaaatcctgctttgtctgtccctgaaagccgtgctctgcctaccacagcaaggcacgagtagcagagaaggaattttcataactggacccatgtgatgatttattcagaggaactctgagtaaggggatggagctgcagctctgaggtctttggctgccttatccctgagcttggatcaggctatgacaggctgaatcttgagggctgaggctgcagggcaggagcacctcctcctgagtgccccagtggggaaaggacagcagctgttcatggggagctaaagaggcatttaccaaaacaagcaggactctgcaaacatgcaaatgcattaaaacaaacaaacaagggaggaaaggaaagaaaaataagcaacaactgtaaagaaccatgggatgttttccttcattctcaaaacaccaaaataaatagcatcactttttataacacaaatttcaactggttgtaggagaaacatcccactttactctcagctgtttcccaggtagtgaaaagtactgtttctcccctccccttctctcctccctccacaacctttcctctttttcctgcatctctccctctctctcctctcccttttctcccacctctccatctcctctctctctctctcccccgccccccaccttctcttacctcctttctcttcctcattttctgtctctcctgagagcagtgtgatgcctactgtgctgccttgggaggagtcctgtagcaaaaccagtttgggcaatgtgttccactctagcttcaggggtctccagtctctttgcagtacttggtataaattcagagacccaagaaaacaggatcaggtttcaaaggagaggtccagttgtgcaattctagccaaatctcagccccacaccaagttgtggaaaggagaaaaggtggggagggaaggatagtgatggggtgtggggtggttaataggcttctttaatgagaaaaactacagtggtgatattgaggctccagtatctgtcacacacacatacatgcacatacatcatgttcatccacgttgtggttcttaacagaaattgaacagtttattataaaattgaatggaccatgtatttagaaaagtaacttccttccctcctccctccatttattcttctttcctttcatgcttcctttcttcctctcactctttttcacattcgctttcttcctttatctcaaactcttccccatttctacaagctggtccattcagagagagacagttctgattgagagctaagttttaaaaggccaactttggggggcaacaagttcttcacatggctagattaactctttcagccagggagaacttagactgttgtttgttggttgggggtgggggtgcccaaagactggagccaagtatttctagagtctgtgccctgatgagaccccatgtgtagaatatctcattaggtaatgacacagggattcataggtaggatttggaacacagaatgaagctgctcttggccagagaccacagattgctcagatcgctgccataacctcattcaacttccccaacccacaaaggaattagtgcctctcagcacattgattgggaatcactagtctggggaatataactacaaatggaactgctgtgcctaagcatgtgtgtgtctttgactatgccaaatactgcctgactcttctccaaaatattgtccaattcacagccccatcagtgatctaccagagttccagttgctccgtatccttggcagtgcttgagattaccaagacaactttttcctatttttctcatttcaaagggctctgaaattatagacctctgttgttttgttctcataaaatcatgaggcctaaaagcggggaaggctctgaaagatttcctggttctgtgccctcatttgaggatgggaaatctaagttctaagcaagacaagtgactcgcctaaaatcacctaacaagttgggggcaaaaccagcactggaatctagttctcaggaatccagttatctttcctctccatcagaggtttcaaggctggtgttccatagaccatattagtccataaacaatctctctttggcctttattagttatctcctttaattagttgccaacatttaaatatcaggagagttcatattaaaaaacagaattcttcttggaactctttaaagaaatgagaagctttgaaaacatcaggccctccatcctactaggcaaccttggactagagcaaagcgctctgctctttggccaggcacataccctctcctcgacacaccccactcagctcgcttgaaccctgcaggctactgagcttgcatcacctaatcttcaaaacttgcctccataccacaccacaatacactggcgcctagaaatccagggtaaagaaccttttaggatcattcccccaggtgcctcatttctgggtagaaaaatgaggtcctagcatagtagctctttcactgtttcacttcctaagtgaacttgcagaattgatgccaagaacagttttccctccattttctagtgtggagcacttgtcttttttgttgtccccatctgagcaacccagaatgatttataaacagcctttctgtttttatctctgcttccctgtggcataattgcagctaagtggcagggcacagcagttacaccgtgagtcaaggaacagaaccaggagagggacccttgtcagccctttaacttctggctttatccgggttccagcactctccagctatcctctgttatgtgtgactggaatccattcttattgacaatggagacagcagtggggggattggctattggatcagataaggttttacctctacatggaatttgagtccaaaggtaaatatattaaacatatagataagaagaaaagaaaaacgttatttaagtatctgatcagctctgcaccccagggacctccacttttgcccaggtttgagaatttgatctatagaattacctgcattctttcccgctcatccatccaatcagccacctttctcccttcaaagaagtgtcttcatttttttccttcttttgttatttttattgactgcccatcactgttattaaatccttccctctttttttgaatgaagcagcagagccttttattttgttttccttgttttgttttttgtttttgtgtttcagaaatgacagggctgtatcacagagttatttgagacggtcagttagggtaatgtttatcatttttggacagtgtgttcacacaaccttgtccaactaacaggatagcaaagaaaaaagagcagggacttaggggacagactggcagatctctattagaattctttccaagctgagtgcccttgggcaagcaatttaaaactcttagtcctagtttcctgttcttgaaaatgggactaatatcactacctcaaggagttgctgtgtggaatgcaaataaggtgatgtaggtgaaacagagtggccaatgcctgacacatattacctcccttatcccttttcttcctgttttcaagcctgcaggccaggtgcagacagatgtgctgaaaaagcaagatgcctcaatccctgaagtgtattctggaaggcagtagtcctaagaaatgtcccatgaaaaaaaaatgttatcagagtttaaaaaacaatgtgtaccttagccccttctggaaattttcaatgggttatccaaattattgagaagtcctgcaactaagaaaactaactggtttcattaactcaatgctacccctactgatctgaccacgaaatcttttgatcaggtgattcatgggaccaaggaccattttttcttttatagcaaaaagagacagagtagagagactcatcttctcaaggagcttcatagttccagaagcatttctctcgctctttctctctctcttgccctctctttttttatttttatttttttgttttatttatttatttatttatttattttgatacacagtctcactctgtttcccaggctggagtacagtggtgtaatcttgtctcactgcaacctctgccctccagattcaagtgattcttgtgcttcagcctcccaagtagctgggattataggtgtgcaccaccgctcccagctaatttttttatttttactagagacagggatgcaccatggtggccaggctggtcttgaactcctgacctcaagtgatctatctgcctcagctcccaaagtgctgagattacaggtgtgagccaccacacccgacctcaaagcatttctcatatattggccttactagtctacaaacacaccaagctccatcctgtgctggaattttatacctgctcttccctctgcctgattatacctctgccccaaacctgtgtatggcttatcccttcattttacccaggtagtagtttagatgtcccttcctcatggatccttctatacaaagtgccttgcccctttccaccaactgtcactataatttcaccttggtttaacggcctaactgcatgcatcattatctgaaatgatctcatgtattacttttctttggcacacaccctccctcctgaaatacacaggataacaggcatcttgtttatcccctccgtccactatattcccaatgtatagaacaatgtctggtgctcagtaaagcccccagtgaaggtctgttgaatagacgaatcagtggatgatgtctcaccctgttgacaatcctaagaaacaaattattttattacttccactttacagataaagaaactgaacctcaggatgttatataagtttccaaagtcagacaactgataaatggcagagcaggggctggagcccagatttccctgattggtaaaccttgtgctccttctaccccagaaaacgaagcatttcagatcttcattttcctgtgaagaagaacttaatgtgcacaaaataattggggagggcactatttatactttaatggctctgcaacttaaagaagaaagtcatctttccctctgggtcttcataagagcccaggtaccttctgagcgtgcagagtaagaatgcccaaactgttaggcacaggtcagaacagcttgggagctagtagcttacagagtaaatatatttaaattggaaccatgtggttccttcccctggtgcttacacaatgtgaacagatgcattgtttagtgtcaaagcccttgtgttgactccacagttacagtctctttgaggtctccacatggtacaatgctgaggctgtcaggagtaagaaaaagggcagagaattggagttgtctcaacaagtgttccttaatgccagttgccctgcatttcagaaggagagtattggagaactgcaaagctcccatcagtgagggtctgagacctaaattaaatgcttgtcctttctgggtctttaaaaaagtaaattggtttgtgatatgctttggaagcttttagctccccccgcctccagactttatttctcactatacttttgagcagagggtagagaataggaatagatcccagtaaaaccctcagttgggtatcgtgaaactgagagaaaacaaaaaacaaaaaacaaaaacaacgacaaaaaaaaagtgcaaaacttttctgacactggtttggccaaaatgtctccctgtctcctagataaaaataggaacataaaagccttgaggttctagatgtaaatcatcggtgcatacgataggccaggtgttgggggtagacacagtcagagaggcaaaagtcagagaaaactgccccctagaagcttttactgttaggcagaatcaacctctttaaagtgtttaagagctattgcaaggcatcatcaccattggtttcctgccatttaggaaacatctgcaaggaatttttattggcactgcaaagtacaccaagatgaaataggcattttctctgccctcaaggacgttctagtccagaaacatgggacaaggttaacaacaaggcctttggagtcacccctctggatgggcacttaaacaagtaacctaatcttgccagtccccaatttacccaactgtaaaatgagtaacgcttagctcatagggttgttgtaaggatggagtgagctcatgtatataagcaatcagcaaatagtaactaatgttattgagtgcttgcctaactataatacaaggggaatgatcatccaagaatgaggatttcatgctgtttctgtttgcatccttaaagattagcctgcaatctgttatgttccactggcactgaggaactgagtttttaatacatcaaacatgaggcaacagcattatagaaagaagggtagaatacccatgagggtgcttgccgagggacacaagagaaagcttcctatggaaatttgcatgatgcttagacctaaagaacgggtggaattcagactggcagaaaggtagaattcagagttgcagcaagatgcaagacatagtctctgtacaactccactaatgatgtgtaagttatcttacagtttataaaagacttctacctccatcacctcagttgagtctcgtggctatatgaggttggccaaatttaagagtataccgaagctcagagatgtgatgtactttgccaactaggtaatagagcataggtatatttacaacatcagctaccacttatttttatttatttatttatttatttatttatttatttagagatggagtttcactcttgttgcccaggctggagtgcaatggcgcaatctcagctcactgcaacctccacctcccaggttcaagctattctcctgcctcaacctcctgagtagctgggattacaggcgcctgccaccacgcccagctaattttttgtattttcttttttagcagaggtggggttttaccatgttggtcagcctggtctcaaactcctgacctcgtgatctgcccatctcaggctccgaaagtgctgggattacaggcatgagccaccgcgcccagcccagctaccatttactgagtgcttagtatatgccaggagttctgctatgcgtttttttctaaactgatttaattctcaaaatgatccttgtaagtgggtactcacaaaatagaaaaaggcttttgctcaacctggtgcctggtagaaaaatgcaataaatattcactgtaatcatgatgatccctttctcacaaatggaaaaactgaggctattcaaggtttaaatcttgataacatacaaagctttcaagtggcaagatttgaactctggtttgtctgttgccataacttgtgctcttaatgagaaactttaatcgctgcctctagagtcatcttcaccctagccagcacccctttctgtcctcagtctcaagccccctgaaatcttggagaaagaggctcttagcctttatcttccaactgagcatagctgtcctgtgaggagactccttcttcccctcgtttctttcctccccagctgcgtgcacttcgcatgtgagaaaactgactgtccagagctggctgtggagaatgcttctctcaattgctccagcagcgaccgctaccacggtgcccagtgtactgtgagctgccggacaggctacgtgctccagatacggcgggatgatgagctgatcaagagccaggtatgtgcaggtgctgagctcagagcctctctgcagcccagggaaggcttactgggtgttaaccatgttctctgctaaatacccagcagcacttaaaatagtgctgccacatagtaggtgctcaataaatatttattgattaaatgaatgcatgaatgaatcaattaaccaagcaagcagtctggaatctctaagaaaaagggttcctgtgcagagtagtgttccacacaatacttaccaatgtttttgtgtaggttgcaaatctccaagaccatggggctgagtattttggaatgaatatcttacagtgagaacataattgaatgggctgctttatgacaaggtgagccctctgtcaatgagatgctcattcattcactaattcattgcaaagcatctgttcactggaaattggatgctatagtaagtactaaagaaaaagaagccattaagacaaatcgagtccttcttctgaaggagcttagtgcctagtggtggaggaagagtcagacaactcattaatgatgaccccactgtgtgataaatgctgtcaagggaattgtagggtgttgtggaggcacagagagattcaagggaggtgccttggaaaagtgacatggaaacagctaactagacagatcagcaaaggggtgtgtgttggggagaaggaagaaatatatgtagtaggcacaggcatggatagtatgtggaagcacattgatgagaaaaaaaaaaaaaaaaacatgccacagatttttttgtttgtttgttttctttttctgtactcacccaagcaatgaggctggaagggccagctgaatccactggtgcagggcctgttgatttagtcaggaagtgtggggttgatcttcaggacaacagggagctgttgcaggaaatgacatggtcagatcctggttgacaaagtctcttctagatactccatgtgggtgtagcttggagtctagcagtaagactggtagcagggagaccccctccctcagacagtcatcaaaggagtcatggaagataggacgtgtcctgcgtgagattggtggtagtgaatgatttggagtgatgtgacagaatgttgcttcagcaagatggtgctgtaatgtcccaggtggggcttgggggagtgggacaggttgtcctgggatttgaggatttctgtcactaaatgtagcattttccagggctggtcagtggactttgccttcaaactgcaagcacacagggcacattccttactgctgggaatgcctatttgtacagaacttctggacttgctcttcttagacacctacttccgtgtgtcagacttggcaggcctgaactcctgtagaaacaattagactgttttggcagtgagggacctcactcaagcacacatccctttgatgtgtgcttaagagggaaaatgtcctttgcttttaaaatcccagatcaacgtttggcatctccagtccctaggatttagcggcttcctccttgaatgaaagcctccaggctgcaatgattgtccatcccttgactccgtagcatggtcttgccctccacccagctccaccatcgtgtagtttggttcaaatctccatttactctttcatttttcctaggcttttttttgtctttgtacccttctctcttgactattgagccgccaaatctgagagtagggagtggatctttgagcagttcatgagttcaatccatccattttgccaaagggagaactcaagtaaggaaaagggacttgcctgtggtctcataacatggaggaaaaacatggaggtctcctatagccatggagagtgcctactgtgtgccaaacactacaacaagttcctagtaactcctctagagctaataaaagacatacaaatcaacacttgatgtcctaccattgaactgtatttcacagtctgttttgtgaaagaagtcatcatgccctgtgaggtctcaaaacctcaagattctcatcaataaaatggaaatcgtgatctgggaggcactatagacagcagttaagagcatagcctttggactcaagtccaacttatccttttcccagctggttaacttaaggctgatcatgtaatgtctctgagtctcagtctctgtgtctttgagatctgaaatatgtaattcatggagttattgggatcattaaaagtgagctaacgttaaacactaagcattggtctcctagtgcctgggcgagactctgagccgtcaccttgggaagaagggtatttctccacatctagagctcagtctgccactcctcactatgcacgactctgcctttcagacgggacccagcgtcacagtgacctgtacagagggcaagtggaataagcaggtggcctgtgagccagtcgactgcagcatcccagatcaccatcaagtctatgctgcctccttctcctgccctgagggcaccacctttggcagtcaatgttccttccagtgccgtcaccctgcacaattgaaaggtatcaagaacgccttccccagctcagccttcctttgtctatgggaaacctagaagctgcatccaggccctctttctgggtctcaaacaccaagggtgggatgggttttatctatgctcctgacttcttcctactaattgtatttatgtaaactgccctgctatgcagataagaaagaaaaaagagtgtatggataattatgacagtgaagccctttccaagaccttggaaatcttgcaaaaaagaaaagaaagagaggataaaagtgaagaagggagggaagaaggaagagagaaaaagaaaaaaaagttacatttgggactgatgaaactaattcactctgtatgattagggccagtaagccttatgaggtaagcgttactattattcccatttcacagatgaggaaaccaagcctcagagggtttaaagaacttgcccaaggctgcaccatcagtggtggggaccatattgaaacccaggtctgttgttctccaatgctggctgccactcattaagaggggccagctgggcagagaagagcagatatggacaggaagcatctggcatcctcctgagctaggcaccagggctattgaggggaaaaagacactggcataccagagaagaggtcacattttagaaaaaagtgagtagctggcctgggtgtcctagaatgctgggactagatgtggaatgtgttaataactccagactaggaaatcatacttctctcaatcaatcagaggcttttgggaaagggaggtgtataaattaacattgattattacagacctcattgtggctaataataatacttaatcaaaatgatgcagatccttccactgccaactgttgttggggaagtgtgacctggctggggagacaaggccttaggaggaccatcattttgacagttggtgatcccaactttgcttttcctttgaccatacagggaaatatctctctatttccatattgatcaactaggaccaattgccacttcatgcaacttggttgtcagcatcatctagtgttcagagtactgtgctgaggcttctgcttggatctactggcagcaaggactgggcaaaggtcctgctgcctttctcttgaacttgatattgccacctaatttgccctcccaccctcatctcaagccagggggtaaagaggtgatcaatttcaactttccttcttttacttgcttcccttttctcctttctaccttttgtttttcctttgatcataacatagtttaagcaaaaaggacaacagtttttttaaaaaaaacttttattttaagctcaggaggacatgtgcaggtttgttatataggtaaatttgtgtcatggaggttcattgtacagattattttatcacccagttatgaagcctgccttaataccctttagccatttttcctgatctcctacctcctcccatcctcttccctgtgataggccccagtgttagttgttctcctctatgtgtccatgtgttctcattatttagctctcatttataagtgagaagatgcagtatttgtttttttgttcctgcattagtttgctaaggatgatggcctccagttccatccatgttcctgcaaaggatatgatctcattcttttttatggccacatagtatttcatggtgtatatgtaccacattttctttattcagtctatcattgataggcatttaggttgattccatgtctttactattggaaatagtaaaagcactaattttaaacaggcaataaataataatgataataatgaccagcttgaaatcctttctgccctcagtttttgccccacctggccctctcctctatttgtacctcttgtccttcttaatctgtcttcttcctctgtacttccgttaaagtctaccccttaccaagtctacccccctgctccttgcaatccccccgtaccagcccttggctaatgcagccagttgattgagtgattgtccttattccagtccagctagtgcatttttgtttcctccaaacaatatagtggccaatattctttcacattctaacatgctagagatggacaagaactcagagacagctttggtttagggacaaacaagttaggtgatttgttcaaggtcacagataaattcatactttatgcattcaacaaatggataccgaggacctactattcgctcagcagtaggctaggctctgggagtaacgaatatacaagatacagcccttgccttaggatctagaaagtgccaacaccatgaggcaagtgcttagaataccagattgaaggtctagtatttctctccttgagttctgttctatgttaattttaatctttacagcactcccaaagagacttgatctcctgggtaatcttttaaatgaagtaataaaaataagtacctctcctttgacactgctacaagttgacaattgttttaatgctcattagagattggaatttccttacccacatttgtagacaggctgggcaggatgtatttttctgcattaaaagatgaacaagtgaacttacagggtcccaaaacttgacggacccaaaacttgatggaatctaatctctaatatcaacacctctatgaagagacgttaccctctaccaggaacttcaggctcagacatgccttcacttcgtgtcttgagtcatgttcccccaggaaatacggtgggggaatgaggacaggagacatggaactgacaaaagtcaacaggctctcttctaaagcaagttgccactgtgggcaactagagctcagtccctctgggaaactctgggagacggtggagaacatgcctccgagttattgcaactctggaaactggcacatgaatccaacaactccaccattagtttagtggtgcttccaggggcattaactccttggtactttaaactcaccctgcatatggacagagtaagcatcaatgaccagtataataagcatccatgagcagtataatagccctcaggcagagagttggcagtgcagtaagcatctttcacagtatacaggccagtgccaagaagacaaacgaagggcacatcatgtatcataccctactttcttcaaagccacattgtagatgcagggtagtggctacagctggtgcacagaaatactgcccagttgaaaactctcttggagtttgttgcaggggtggggggacatatccatggtcctgaatcaccagtgcctgctttagctgtggtgcactgctaacttctattcaccctcttccagaaagcacatttctggtttgcattttctctcttgattaacattttggaaactttatgttctcttgtcacagaaaaccacgactttcacttcataatttaccatatacatagctaatacaatgtactttttaagagtcccaacaccttttccacagatatgttatctctcttaggcaatttggagagggtgtgcttcctgtactttatatacagctccccttcccactaaccttgtgcattagctgggcaccccaaagcaatgactgccccgattacaagggcaatgcaaaaagaagtttgtagacactgactggtattctggacgcttctatgcttctatggaaaccaaatgaatcacctttctgcacactttactctttttacttgatgttaaaatatatatagttgtcagtctcacagtttgtcaatgtggaatcccctatggggtttacagacaccaatctgccttgtgctaaccagatgaatcatactgacaaagaagaaaaatgaaaaaaatgagaaggaataagataagtggaggagcgtacataaaattgcaaagtactttctcccctttcttccttttcctgctttttcttatagtacttggcaccttctggcacactaaataatatactttttaggataatttattgtactcctccctgtcccactagattataagcatcaagagaacagagctatttctatcttgttttgttttattttgttcactgctttgccttcaacatataaaagtatctggtgcagaataagcactaaatagatatttgttgaatgaatgaagacttctgtgaagattctttcagagctactaatgaagatgaaaagaagaaggaaagtgggaggaagcagggaagtgaagaaaggaaaggagggaagaaggaaagaagttaagaagcaaacgaagacattgacaacacttttataggcacttttcataaatgttgttttatttcatcttctcagcaccctgaaaggcagaagcaattgtttgctttccacagatagaaaaattgagatttgatggctccggaatgaataataagggccctgctgatcatacgtagtagccaacttcccattaaaaacaaccatctctgtagttagacagaatttgttttgaacctcagttttgtcttttgccaactatgataacttggtcaagtcacctctttctgagtcttcatttccaaataaagactgtcatactaaatgcactgtttatagtgagaataaatgagattgcatatcagaagcactcggtacatagtaactgcccagtagatgtcagttttctccctaccactccacctctccaacctgcaagtccccgagcccccgacatgtttccagccctgattgtcaacaccattcagtaataaccaggaaaaggagagtttggtggagaaacacaagtttcaggtcctcctctagttgtcttgggaaggttttaggcgggctgtgcctcgataatatatgagctggcagtgaaaagcctaactcccgtgttttacttttatttgcaacgttccccatcagaccagcttcccaatggcagtcagcactctgtcagagctggcatgggctacgggggaagtgctgctctttcacctgctttggcaaagcttcactgagcaccaggacctgaacagaaaatcaaatctcctaacacaatgctgtcacttccaggcattggtggtgggagctgggggaggtggtaggcaggacagatacaggggtgctgggcccagggggagagtggcagcttgaggtcatgcactcactgatatcagaatttgctgtagtttctggtgggagtttttgctgccaagtattagaaggcaagtgcctccatctctgtgctcagatgcccatttgtaaagtaagaaaaatggattcaaggattgtgagtgtgtcttttctatgcagcagaagaggctcaggatcagaagtcagaagccttggattttaattcactgtagacatgggggtaattcactccccccatttagatctcctcttctttgtggcagctctcttgatttccctaggctcctcagttggaagtagaaggggttggaattccacataagggatctcctggttcttcaagtcagctaaaatccaagtagctatacattagcttggctatcagagactcctccctcctctaaccctgcttgcctatgtcttccaggcaacaacagcctcctgacctgcatggaggatgggctgtggtccttcccagaggccctgtgtgagctcatgtgcctcgctccaccccctgtgcccaatgcagacctccagaccgcccggtgccgagagaataagcacaaggtgggctccttctgcaaatacaaatgcaagcctggataccatgtgcctggatcctctcggaagtcaaagaagtaagtggggttggaaatgcaaacttatggtctctgggaggacaagagttaggttcaaatgcctgactggacggaagcactcatttcttcactggaggtaatgactgccattcatcccattctgttctgtgagaagctagaaggatttgttaataatattagctttgggtcaaacagaacaaactttaagtttcagcttggctgcctaatggcaatgtgatctcagacaaatgactttacttctctgcacttcattttttttttaagccacaagaggggtatgataataacagttaccacgtaaggttgttatgaagaacaaatgaagatgtgcatgtaaagtgctcacaaaatgctttgcacgtagtagttgttcagtaaatggtgggtaatcataacatgatggttccaacacacatcagaacactctgcaaaaaaggggagagaacctggggctgaagggcatgagttttgtctcaatctacatgtagctggaagcatgacatttctgcctgctcttgctaaaggagttctgtggatgaattatccttaattcctgcacgggtcccaccagaacccaataggtcaggtggggaatcaaaactaggaaataggaaatgggggcccagctggtggtgttcatgcagggcatggatctagccatttggtccttgagatgtctcctgtttgatcctttccttgaagacgggccttcaagactcagtgtacccaggatggcagctggcaggagggagcttgtgttcctgtgacctgtgacccacctccaccaaaattccatgggctctaccagtgtactaatggcttccagttcaacagtgagtgtaggatcaagtgtgaagacagtgatgcctcccaggtaagcctcctggaacttgagattgataccatggtccctttcctttctgcttaccaaaaactagcctgtacttcaggaaccactttctgcacttttgtaatctctgatcctcattttcctacccgcaatactgtttttgatttgctcagagattcttagctttgaatttttttttaagcattggaacttttatgaaggaaatcatacatggaatcccaatgtatgaagttgataaaagttaagttcctcaaacaggaaatgaccagggctcttttcccagtttgctacctccattaccacccatgttggtccttgaagtatttaaaatcacaagactgcaactatatttagacatcaattggctcctgaagcataaggaaaaaggggaccatatttagatgagaagtacagttttgagaacaccatggaagaaaggaagagcagaaggagcaaggtttgaattttatctcaatccacatgtaactgagaacaagtccaacactcctgcctgcctctgctgaaggaattttcttcaaatcctacacatgcccaaaaggatggtacgggaatcaagaataggaaaaaggaacaaaaggctgaaaaaaccttaagtccacaaggagctccatctccatcaaagcaaccatgcagagttgataacccaagtcctgtgtttcacaggtgtgcaaggatcatcagccaggtggggatagatttcagtgcaggcgtcgtcttcaatcagtctttattggtctttattgttagcctccagataccaggcactgccaaatcaccattctgaatccctctcactccctccatatccaagcaattactgagtcatacccattctcccacaacagcatctcctgaagctgttctcttttgtccccaatgccactaccctcactcaggccaacatcaactctttgatgagccaccatgcagcttcgtgatcattttcctgttttaattcctgtgcctctttccagtacattcttcacatttcagccagagtgatttgagcaattatgtcaatctctctgaaccaggagcccccgtcccttaggataaagtcccaactccttagggtgacatttaagacccttcccccatgccaataagatggattttccccccacacctctgcattctctaccttaaaaagagttatccttgtacctttttcagctgtctgacacctcatcttccttcgcaatttagcccaggcaccctttcctgcaggagcccttcctcaatatcccttccactgccgggctccgtgcccctcctcaggttcccccttcacaacattggccacactgcgttgtcactgcctgctttcattccacatccccacactaggctgtgaaacagtccttcactgcatctgcacccttccctgtgcctctcagcacttaggacagtgccaggcacctagtaggtactcaggaaatgtcacaggaattaagggcaggaggaaggactgcaatgaacatcaaaggcaggttcctccttttacagatgagaaaaccaagactcaaagaggttactcaaccccccatggtgacacagctggcatcggctgagtcacagtcagaatccaggttcccctgtctccagctgtaaatgggctgagtccagtaggcaccacctgagaatcctgttctcatacactctcggcgtctgtttgcattcatgggagtcattcccatccttgactgccagggaggcagaagccagtaccggaacaaacaaaggctagagattaccacggcctcttgcaggctgatcagcttccccctcactcccttacataaaactgttgctaacagttacccaaactgctgagccaaataatattctggctgcggtcatgttatcaaactgaaactcagcctgcctggggccttccaagtaactttcatggccagtttgtatttaaaggagaggaaagtgtaaatgtatcagacgactcaagcagctctgtttggcaactaacggagaggctagtcgcaaaggagcagggtattgcttgtctgctcaaagaatgagggtgtgcgtgccaaatggactcctaatacaattgacgtttctactttgtactgaaaatgaatttcctctaccctcagatcagggcctgagagccaaatctagtattcacctcagattccctcttgctgcctataaacatagcagaaatgcatggcccagagcatcttgaatcagcttgtatggagcagggattctttgctttccaaacaagtttcagatcctggcgggaaaggataggggctgttgtaggggagagtcacacactctcttccactgccactaaaagcaaataaaaacctgactttattcattccttgggagccagtatgacactggatctgtagtttgagttcaaatcccagctttattacctagtcactagaggccaagttacttaactcgttaagcttcacttttcttgtgtataaaatgaggagaaagaatactacatacctaatagtttgtttgtgaaggttaaatgaggtaatgaaaatagagcatgtctatgggtacccactggccttgtgcagtgcacaacctgtgcaatcatatgtggtagccctggggaatacacaaatgaactagcctgctttaaggtcactccagtggcgagaatcccttatgctctatgtgagctcctggagggtctagaaacacaacagattgcaacctagccctctgctggctagctctaaaaactgagaagttttctgttttctgcatatggctagccagttttcccagcaccatttattaaatagggaatcttttccccatttcttgtttttgtcagatttgtcaaagatcagatggttgtacatgtgtggtgttatatctgaggactctgttctgttccattggtctatatatctgttttggtaccagtaccatgctgttttggtttctgtagccttgtagtgtagttttaagtcaggtagtggaatgcctccagctgtgttctttttgcttaggattgtcttggctatatgggctctttttggcttaaaacctagatgacagtttgataggtgcagcaaaccaccatggcacctgtatacccatgtaacaaacctgcacgttctgcacatgtatcccagaacttaaagtaaacaaagcaaaataaaaacaaaacctgagaaggaggcacccatcctgcatgaggccaggatgtggagtagagagaccagcatgagctttagtcaaacctggtcccttgctcaaataaacctgtagaataaatagtcctctagttcctgtagaccagcactttccagtagaactttctgccatgataaaaatattcatatctgtgccaggcaaatgatgaccactagctgaatgtagctatggagcacttgaaacatggttgcagcaaatgagcaacaaaatgttaacttttatttaatttgaagtaattcaaagttgaaggcaaatagccatacttatacagtggctaccatatcagatagtccagctctagcacttacggtattctcgtctctttaaaccatgacagagaaccttaataataacagctttctttgtctttgtttttgagtgtcaaatgtgtgccaagctgctgctgcagacttgctctcttttgacagctcacaacatacagctggaaaagaaacaaaatccccattttacagatgcagaaagaaggcccggggagggtaagttcttgcccatggtgacaagagagcaggtgatgttctttctgatctctagctctgctctttccactgctcccaaacatcttcaggccagaccagtagtgaagggcagagattttatccccagggggtgagaagctactcatctcaggatttaatccagctcagatggccctgagctagttgatgagataacataggcctgtgggggctttataggtgagtcagggagtggccagtcttgggatggggacggggtctttggaagatgcatcagcaggggaggacaaaagctagaggtgctttgtgggcaaagtgatgcacctaatgatggatttcagcaactcagcaggagcaagagagaaagggagcggtggaatcttcaacacacccagctcattgcacagatcacagaaggtggctgtgaaagcctttctgccataaggggtgtagagctgcactctccatttgtgagccctgccatggacaaggtacagctcacatatgtgcagtgcctcagctaggttttcatttccgggttgttaaatgtttggccaagcacccaggatgtcctagaggaattcagaagagtcacagacccatgtgatgttagagctaggcaggacctcagagacccccactgtagcttgcttgttttactgatgggagccctaaaccccagaaagggaaagagacttatcctgagtcatacaagcagagccagttcttaaactacgtcactttgcaattcacactttccactcatcctcccttgtggggcaacatgtcacccctgtaccaaccttggaagacacaaaatgcatgtgagggcattgactgggaacagagacaaatgattcacagcagttgaaataatgagcacttactacatgccagccactgagatgagcacgttagattgattgcttcatttaagccccatggcatctggcattattgccccattttacagatggggaagctggtgtaaactggtttgccctgttttatacaaccagacatggtggaactgacactcttgtttttaagtcagcatgcctccaaagcttagccatctagctcctgcactcactgcctggttttgtcttgctcggatgccactacatttctttccgctattattttgtttattttcatgtcttctaaggagaagaagtctactgcttctccctcttccttcctcttctcttctttcccttcatcccactggggtacaacagcttacagtcaagagacatggttctgacattggcaacctttgtgacttgggcacattgcctcccctttctggctgctgtcagttccaaaatgtactgttggttgggttgattctaaacttctcttagagacagtacagcaaagtgagtaagaacctcatctgacgattacagagctcagtatgtgttaggctttaaatgctttatataattggactcacatgatcctcatgatcactctctcaggtagtagactccatgcccatttagcagtcagggaacttgaggcatagagaagttaaagagcatccccaaatctacccagctgggaagttgccaagcttgcatttgaattcaggcagtttgacttacacccaggctcttaaccatgacactagcatcatttgaaaactcactttttcactttctaacagagtcagtttccaagtctgcaaaaataatataatttctactctactgtattgttcaagtgatttttaaagcactgggcatgttataggtgtttgataatattattatatgccttcagctctccgtggatctgtgtagctaaagcagcaggggagttagagctcaatatgcgcttgtaaaaacagatgcacaggcacagagaggcaaactgttttgctgagagattttcagccctcttataagagatttcaccttagcatgaagaattgtacaactggagtcaaacatacccagtcagttccctgacaacacctagaaaaagtaccctctggtcttcccaggttggagcttcagtgatgccagatcttctctggtcaaaccagactcagtcagcaataattgactatgaatttctgcaccaggtggtaggcaatttctgaatgcactagcatctagtcttaaagaaggatttaaaaatccaaagaggctccagaaagtctgcatgcagagggcacagcaagggcaaagatgtggaggtgggaaagcaagaaaagtttgcaggagaaacaaagtgattcatttgtctagcaggaaggatacatacatagcaagagatggagctagaaatgtcatctggattccattgtagaagccctgaagtgccaacctaccagtatgccttgttctgaaggctaaagtgtcttagcaaaaggatgctatatatttttaaaagcaaattttgcaacacaaagtgccagatgaactgggcaggagagagataaaccaatgataacaaaaccagtgctttatgctcccacctttcattcatggtggggcctccccagtgtgaaactccatgagcagactccggctacttctaatacattctctgttacaaaccaagctctccagccagccctggcccaagtagtgctgaggtctgcagccctttaggggttggaatccaaatgcatcacaggcccaggccaaggctccaggaaattggggtcaatttcctactccccagagggcccaggagaatcatggggcctagagcctggggctctgagaaggagagtctgggctctttgaagccacatgaagctgcgtaagtttgccacgagcccctacagaacctctgggagtgaactctgcaagccgccttgcagctgcatgctcaggatgggccacccttctcccaaggccagagaggtttccattgcaattgtaccctccttttgccggcaaaggagaggcctggaaaggggcccctttctcttctgaatcttgtctatctgcagctgttttctcacataggggagcctcagcctacatcagttcttttaaggagtttattcattttctcatacattcattcataatttattccctcattcattcttttcttcatttactcacttgtgcatttatttcctcatctgtgtgttcatttattttcttatttcttaaagaaatacattctatcactctccaccaattcaccccatcttttcgtaaacaaacaattcttgaatgagcaaaaatatctattaagtgatgaatgaatgcactgagtggcctggaccttttaggcattgtggaaaaccctgaggatacaaggttgaatagggcaccagcctgggccttgaggagctcattgtctggttgcaaaacagatgataaacaaataggtaatgtcctgtcagagacattcaggtagtgccccatgcagaattgagatggcaggagagcaggatgggttgtgccagataaggtatttgcaaggtagacaagggtgggtaggaaacaatagcagacagaaggagcagtgagcatgaaagcacaacatacgatgccttcacaaatgcaggcaatttaaactgaagttcaaggttggtggtggtgctctggagagcaagaaactggagaattaggcagaattaaggctgggagggctctggagccagcacaggagtttgcatggaagctgaaggtcacaggaagccattgcataaatttttgcattggtggagcacagccagctcctctggcctcatgtcaagtttctcatcttattataagcctgaaaggggtagagaatatatagcttgttcttagatccttcacaatatgggccccctgcacagaaaccacctgtgattctccatttctgttcggtaaagtctaaactacttaagttggcatttaaggctccacgctttatctgtgttaccagctcatcttcccctgcttcatgccttgagtcatagaattagaaccacaacaggctctccagcacacacgatatttttcatcatttgcacacgcccttccatcttccaggaatatcttctgttccttttctgcctgcaattccatgcatccttgaaaacccttttccatatatcatctcctctaagaggccttccctgattgtcccctcataaccagttactcttccttgtgtactcacagcactggtgtgatatttgccctgcctcactgaacacagtcacactgacatggctggtggatcacatgactgccattcccactagatcgcagaggcaggcactggctctcttcacttctgcaccccacagagctgggcacagattggacactaacgaatcttacttgaattagctttctgaaattcggaggttggaaggggacgtcaagaagggattatgtcttcaagctgcatttgcctaatgctttgcagaagattgagaaactataattccctattttaaagaattgggaggaaagcacagatatataagtatccccatatcaccctcttcatgccattattgttggaatggaatgaaatggaatagaatggaatggaatgaaagaaagagaagatgagaaaaggaaaagaaatgtcttggaaaaaaagcttctcagctagacccagattattatttatgacagagccctgacataggatactttctcactatttaagaggaagtaaactttagtgttcctcattaacccatgctgctactctctgtgtcattcaaggagctgatgggctcctaccctctcaatttaaaaaaaaaactcccacacacaaatcaaaactataattggctctgattgaaatttctgaaagactactaagctcggacttgggagtttggcattctggaaagccttgaacaagtttcttcctggtctgagtcctcagtttccccatatgtaaaatggagacactaacaatacccctctttcagggtggttgagtttcaaccattgttaagaaattgttttggaacacttcagagctctggagagatgaaaaattcttttctgttgtattcagaatagcttattcaattggggctggtgtctctcttggtcctaactctgtttctctgttgttcagggacttgggagcaatgtcattcattgccggaaagatggcacctggaacggctccttccatgtctgccaggagatgcaaggccagtgctcggttccaaacgagctcaacagcaacctcaaactgcagtgccctgatggctatgccataggtatgatgggcccgagaggggagcagtaggaggggcaattccttccagcaatgcagggctaatgcctgggtgggtcattgaacaccctggccacatgagttcctgcgtaggcactacagaaagagagatgaattagtgtagaccatgtcctcccagaaagagggtcagggacagggatatggtgacacaatggtgggtgagtgtgcacagttacaacagaatacagaaaagctgtcaggtgcctggtggggacacagaagactcccacaggaagggatgcttacttggggatttgaaaaagcttgtcggggaagaaatgctattgcaggcagaagaaactctgtggctgaggagcaggagttatgaaagcacacatcacatttagggaagcaatagcagtctggtgcagcttcttttattattaatcttgaaatttgcatcatactaaacattcatgagtacctgatatagttcaggcccttcatcaagcacttgaaaggcattatatcttatcctcacaataacctttaacagatgagggaatcaaaacttgaggggataatggaacatgctcccaaatcctgagacccatcctattccaaagtctgacttctttccatggcatctcagctgcatccaagatgagcataaactgcattttcaaaatactctttgcatggtgacaggccagctcgagaaatacacacagtgagaagagacaagctgggattgtatgccagggatttgcctcgttgaaaccaggtgtctggacacatgcattaatcaccagcaccacagctttccggggtactcagagtgcatggagtgtgacctcatttaagggcagtgatgctgaccttttgggctgattccctaattgaccatgatgaaaagcctagggaactgaacatcctttctcctggccaatatgatttatagagcaatcaccaggggtgtctggtgtagaaggttatctgaatgtgcatagagccaacatgatcttcatccagcaaacagagagttatcactgcatgtccagaagcaaggcctgtgtggttggagagggaaggttcatggggactgtccatccttttttgaagatgaaaacacatgccctcagatagcagaagttcttcactgtaacttacagtgggaatcagcactcttgtgtttagcccaggacactggctcctgcatgggtcagaaaacaccaaaacacatgattgctctcgctgatggtttggaaggtactttaagatcttatacagccaccaattcatgagatgctgaccaggagtgttgcagagagatgggatcttataggacctgctaatataggcattctagaaggttgggcaacaagtattgccatggtgagcagcatgggctgcaccatcccaaggccaacactttctcctttccatcattcctgataggtgtgcgtggtcctgaacaagtatgtctgtgatggggtcccaacctccagctcaatcagaatatgcaagtgaatattcattcatactcttaactggcattgagtggctctgtgagaaaaagcctaattaagtgacctttagggaaaacctacagaaacaaatttgctgcatatctatacccactgacacattcaaatacattcacacgtgcatacataaacgcatgccacatgctgaaatgcttcataaacaaacagccccaaacacacacatcatatagtaagctcatgcctaacacctacacatcagccaaataccacacaaatgcatcactctcacaaacacatacacacacaggtagcacataaacctatacacagcactcacatgcaatacatacaaatctcatacttcaacaaacacaaacacattttatgtcccaaaacatatcaaacacacagaaagacgcacaaaaggcaaacaaacctcacagacgcatttacatattttattcagatgtctcaactgtacgcaaatgagtacgatacctggctgtcttctctccatcagaacagtggagaaagaggggaaggggtgggagggtggtatttctttacccactgagtgttttcatggtcaaagcagaaagggaaagaaatctatatgatattgcagcctgaattaactcctttcctgtaccccaagtccccacggctggcacccagatgtccatcttataaatgtgataatccagggcagatgatgagtgcatagggacactggaggagatcagagagaaaaagccacatagggagacaggaagactgagggtgagaatgagaaacaaggcaggagagcagtttttgctcatccactcctcagccccagctgtatcctcgctttcctccaaatgcgcctgacttccacctcccaggctgagcccttccctgaggagaatccactttgccaaggagagggatttgatcactggccttataagcaggggtgagatatgtgtcgggcttgggggctggagggcacattctggagtcacccagaccagctccccctgcgtgcctcccccaggccacctggggaggcttctgtggcagttatgagccctcagaaagttgctgctgctgccaccagggctgccaccctccccgcgcctcccgggaaggagacgcggaggcctggtgagatcaccactctgtaaggatgccaataatggctcatatatcacaacacagcagcctggtcctaaagccccagagctggggtaggggaggagagcctgggggagggagacgcggagaaagagaaattaagacatgaccgctgcataggacagcaagtgtctcctgttttgacaaccgtttttttttttttttcctctcttgggataagatagcctttgtctatttctcagaggctgcatttttttttttcaaaaggattttattatcacagccttgtctcatctttgctccctaaaaactcctttagaactggtctcatgataaagcacactccataagcagtttctctgactgcttagggatttttgctccttattctcatcactcatcatttttgtctgtgttatccccatttcttgtctctcctctggcctctcaccatctctcctgtttcgatggctgcctccttctctcctctctctgtgtggctgcactgttatcgattgtggggcctggaattagagatgtggctctctcctcaccagctttgtgccctgagctttgtgccttttggctctccaacctgtgaaacgggtgtcatgtacatatgtatatttggaagggggcctctgaaatagctaatacatacatatgtatatttggaaggggggactttaaaatagctaatagaataggatatttaaagaaaagagttgacttgctcctagtgtttggagggtggtttcgatactaagagaaatggcctctttcaggcctagtcagattctgacaggttgtttctttgcccacatgaataaatgcctctttggggtactgagtactttccatggactaggcttgatttttcagatgacctcaggatgtgtgaggtcagggtagagaatgaatgagctgaattacagtcaacttgccaacccacagcctggaagtcaactgtcttcacccaaaagttcctggaccaagggcttctatgtagtagccctatctctattagtcatttaccccttctttgactcattacctgattttttttattcctttatccatttaatccataactcactcattcacttatccatttatgtacttacttcttccttcatacgacacctaaatgcatattcatcagtcagtcatcatgccattcatttatccattaatccactcatttcctgatccattgatgtacttattcactcactgtctcttgcactcattttacaaatacttattgggtgcctataatctgccatgcacagtgccaagctctggacatagaatggggagcatgggtagtgctggccctatagagttacagtccagcagggaagagagctattgatatcacactcaccaagcaaacaggaaatgatcatgtgacaattctgtcatgggcacctaggaggggcttggcctgtcaggaaaccatgaaggtcttctctgagcaagtggcttgggattgaggtctgtaagatcattaaaaatgcacttgttggagtgggaagggtctttaaggcacagggaaaggcagggatgaaaccctggggcaagagaagctggtattgcatttatgtgctcatcattcactcggccagtgctcactgagctctacctgggtgtcacacgctgggttaaactccgagatgaatcaagcacatctgatgatggagtactctcactcagttgtggaattcagggcaaacttcttagaagaattgaactggcccttgaataatggatagaattcggttatgggaaggcagattgggggacatttcaggagatgggatgaacaagagaagaagcacagaggatgagaattgtgggactcagatggaaaaccaagtgtagttcagtccggttgaaccaaccaaagagtgaaggtggttagtgagagaggagattgaccagaccgcaggaggcactgagtgcccagcaaagggggctgtattttgttctggatgtggggagccttggaaaggtgtttgagcagaggaggagcttgatcaaactagggtcagagccaatgagtgtggcagcaggaaccagtcagatgggaggcatgtgaatggagtcagggagaacagaggtggccctgcctggcttgccttctccttcccactgccttcaggttgggtagctgagtccaccagggaccagggagtgggagggcccactctgcaggagggcagtttgcagatgttgagggtctcgggcctgagctgcgcctcatgctgtacttccctcagggtcggagtgtgccacctcgtgcctggaccacaacagcgagtccatcatcctgccaatgaacgtgaccgtgcgtgacatcccccactggctgaaccccacacgggtagaggtgagtgaccagggacatctacccacctgcagctaagggggagggaaatgatattgttgagcacttgctatgtcccggttctgagttcattctttcacacatattacctcatttaatcatcacacctgccctgtgggtgtgtgttgcagggaggtggggtagagtcgggaggagacttattcacaatcatttctctagtccttaattatttaatactttctctctgtcaggtcctatgtgaagggccttttatttactgtccactaaatgctgatgtcagcctaggaataaactgaggcaccaataacagaggtagggagcatagagccaggtttcagacctgagtctgtctggctggaaagtccatactcataaggatggtgttgtatggcttctctggtgccctcccatgtagccttccactttacatagcctaggtttctggtatccttctccaagctttacctgttttggggaaagcaattaataggtgtctagcaaactagtaacatcggttgtttgtggagaacctgccacgttcatgtgtccggtgcttagcacgaagactccattttagcctcagcacagttgtatgagagaagggtcattgtctgcattttccagttgtggacactgaaatctcggaagtgaggtgatgggccctgaaccaaggcttgaacccaaacctgagtctgagccctgtgtgcttcccacagtgccaggccggtgtgcccccagccagatgactacagaggccccctcctcagggcagtgtcagtttgacttcaaggttggctgttcccactcgcctttgtgtcacccaatcaactggggcccccagagctgatgtgggccctgcttttctcccccaggacatcgcaggtcccaggccttatgtgtcactctgggcactggctcttcaccctggagaaaccgaaagaaggaggccggggttgcggggtgggcgaggttcagctctgtgtctctccaaccagcctactgcctggggtgctgagaggccatggagcccagggagctactgtctgcctgcctgctgcagatcacactctggatagctgggcagaacctgatactgggtgtactgtttctcaaatgcgctgagggcacgattgccagggcttactcagcactccgagtgtatagacctggccagacctcctccactcctctgtgcgccccggcatgctcctccactcctttctgcttcctctttctcttttgctgtctctttttctgtcttcatcttactctcactaatttttttcctatctctgtttttccactctgtttctctctcctccctcttctgatatacctttcctcttgttctgtcttcctctctcccacactctcctttccatcatccactgtttctctctctctctctctgcctctgactctctgcatatctacaagacagccctatttcccaaacctcaagctctttcatctgtttcctccaccattcctgaaccagaattcctgcacagattcccccgagtgccccagtgcaccctgatatgctcatatacccaggcatgcagggagcccacatgtcagaatctcaaggcagctagagataatcaaggacaggttcctcattgtacagatagggaaactgaggcctatagaggaaggcggctggtccacacaggcagcacaactggaacgacaagctggacttgtgattggcagctcttccaatactaccagctctccttccttttcccacccgaactcccacatacccgaaagcaggtgagtttgactcacacacaaaacagacacaggagacctccctctcaccccagtatcagagatcttcttggcctggaccagcctcccacttaagacctttttcctaccccctgggcaaattcccacccttccctctgtgggccctgggcactaaagagttcagttatgattcactgtgaaataaatccagggatttgaaagcctgcaagctgccccccctccccaccattgcccacccgctgcctgcctgccccatcccccaacccagttccctggtctgcctgcctttattgatgctggcctaccgagagaaccataatgaggttcagacctccactggtctctggaggcctcattatccaggaggaaaaaaatgtggtagaaaaagggaggagggcgaagggcagagattgatgatttccaggaataaggcagaaaagctggcctctgctgcacccttgccccttgtgcggtgagagctacagaaatagagctgctggtgccagcatttccaggccagaggaggccctggatagctcctctgctttctgagggtctgcctgcgagcaccagtgcaatttagatagctgggggtgaggctctgctccagctgctgccacttttatccccggggtaagagagtgagaggcaagaactggcatttattgggcacttgctgtgatcaggcactgggtcaggcacttcctatcctttatttccacctccaccccctaccacacacgtacgaccacacacatatgtccctatcaggtgggtattagtctcttcctgcttccagtggaagtaatggaatctcagaggtggaagccacttgcctaagagaaggtgaagagagacccaggccagtctgatagtttacttcagctatccctgcagcctctatgaaatgtagagtaataaaggcaatacatttagtgatggcttaccagggatgtgctggcaaatagttaacaactggctctccacaaacattagactctgctttgtagcatttcccaatttctgtgatataaatattcctaccgtggcagatttcaaggtttccaggttgctgtcactgagcacaaagttgggaagatccaggcactgctggctcttgcgagcctatgcaagccagctgtggtccaccaccgacacttagccaagacagactctattttaagtcctttgcatatattgacatgaatgaagagaaagatgactgcttagatgagtggaatgtcaacactgagatcacaggtcatgatgtggacaccaggacagtgagctttgtgaaggcaggaccacggtcatattagttaccatagtacctcccttggtgcctagcacacagcaggtacttgctaaatatttatgattgctgagtcagatgacccaggttctagtgtaagctctggtgccttcctgctgtatgtcctggagcaaatcctgtcacttctctaggccacagtttacccagttgtgaagtgagagctaggcttcactcaggagtcacaaactgaaatgccacctgaaccaggcaggtggagaaatgagtgaagcaggccaaacatactcttttgtatattaaatactgaggcagccgggcgcggtggctcacgcctgtaatcccagcacattgtgaggccaaggcaggtgaatcacctgaggtcaggagttcgagaccagcctggccaacatggtgaaaccccgtctctactaaaaatacaaaaattaggcgagcatggtggcgcacacctgtaatcccagctactcgggaagctgagacaggagaatcgcttgaacccaggaggcggaggttgcagtgagctgagattgtgccactgcattccagcctaggcaacagagtgagactctgtctcgaataataataatgataattaaaaataaacactgaggcatattagtagtagtagtatttactgtaaatattttggaaagaaagacttgcagaaaaatataacacccatacacatactacccaacttaataaataaaaactttacagatactgttgaagttcttttctacttttctttttttcaattttttatttttatttttttttagtggagatgaggtctcactgtgttgcccaggctggttttgaactcctgtcctcaagtgatccttctgcctcagcctccttcttttttattgagctataacttacttctttaagtgtaaggcattataaattgttttgggtacactcatgaaaccactactcatattaggatgtggacctgtccaaatcttcagggagtcctccctccccaggccaggcaatttctccagcaccaaggtaaccactgttttgttctctattgctatggattggttttgcttatttgtaaatttatttgtagacttggtccctatcactacgaattggttttgcttatttgtaaacttcatataattagaaatcatgaggcattttcataagtgtgttttcaacttctataaagagaaacacaatgtaccttcttttttgtgtcctaaaccttctttttctcagtccccttccctgtacatgcacttttcaaagtgattagaggtacagagaactcttcctctaatctaataaacaaaatgatacaaactcaataataggtggaaatgcccctcaggttcaatgctagagagaaactgcagggaatggtggggactatggcaaactatggaaaacacagttgttgtttttctgcttccaaagggggacagcattagccaagtgcagcaatgtggaaatgtgggcctcctgtggccaaatttttcattttttcttgggtacaagaaatctggagttcttaaaatttgaaatctctttctttttttaaaaagtttggcaactaattttgactttttttaaacacttgtatgccaaacaaaacatttctgtggtttgtgtagcctagaagctgttggcttgcaacctttggatgagatagactattccagtctggagacctagaattctggggtggcagcctgtctcccatcagttcctaagaaatagatccaatttgctcacacattgtcccttgcccagggatgctgagagtgtttcacaatagaaagtgcatctccctatcctcagaaccttataatgcctttaggtgctgagaccttggcttttataatagcttctgaaaaaaaaatgggaggcggaaagagagggagggaatgacttaaggaaagaagaggtaaattgccatttattgactatctctaatatgtagacatggtttgctaggcaattctatatatgccatttcattttgtctccatcactccccagtgaggtaaggattatcacgttacagatgaagaagctgaggctcaaagaggttgtcattgcccaattcacataacgactgtggcagaattagctagctaattccactgcattccatcctgcaagggcaaccctcatacatgtcttttaaaaatatgcaacacatgcagacagagaatgcaaaattcagttgtgaaaagaaggtagttttgtggaaagccctgccgagtgtctaaaggtcagaggtcgaatggttctgagtgactgttaagtccagtctaactgacctagagatggagaactaagtgcactggaggggaagcccatagacaaagagatgcagccagaatctactgatttttttcattcatttatggacacgctcatacattcgttcatttgattgtccatttgttcatttacttattcaataaacatcgactatgcacctccaagcagatactcttcaaacactaggaatacgaagtgggaaatgcctaggcttttaaaaagcttaccctggaaagaagccagaaactcagtggctgataacaaaaagcaaataattaataataataataataataactgatatgattcactcatagcaggtcccagaaatcaaggaaaaaagctaagggaaaaagggcttatcttagaagacatccaggaggggtgtcagatctgagcctctggatgagggggctctcttagatgctttctcacatgtctttggctctgcttggggcctgtcttcttgggccttcatcttttagatgctctacccactccaacatttgtctcaaagggcctctccacctttctgaactttggtcttcccatcggtcaaaaaagtaagctattttatacttacagcttcaggggatggtatactttgaaggagattatggcgttcaaagcctagaccttaaaaccagataaatgtgggtttaattgctgactgtcactacctatgtgtacgatttggggcaggtcatttaacttctctgtgccccagttttctcttgtgtaaaccagagtcaaaaatagtacctatctcatagttacggtgagaattaaatgagatgaaagctctgagcccagggcttagagcataatatttattaaatagagaattttgtgccgatgaggatgaggatactgatggtgatgatgatattgacgttggtggaggtggtgatgttagtgatggtgttttcatgctggtgatgatggtggtggtagtggtggtgctatgatgatgatgataaaaagaagatggtgcagatgatggtggtagtgttggtggtggtgttgatgatgatgatggtggtgatgatgatggtggtgccaatggtgctgatgatgatgacagtgatgatgatggtaattgcaaccaggaagaaaagatagtctattcttcctaccaccaaggcaggaaatgaaagccttcttacaaaacctgatctgaaaaagctctggctgggctagatgtctcactggtatcaagaggaaaaaggctgacatctgaggggccccatctgagatctcccaacttctcctgtaaacagcctagccaatccttcagctcccactgcctgtcccctttcccagttctagcacacagaggggtcctgtagtgagacaggtggggcgtgcagccctgagtaatagtggaaaatccaaaagccttggaaagataaataggcttatgcagatagtataaaagtcctttttccaaactcacgtcaggtaaacctcaactgacagaaacttgtacaaccacaccaagacactcctacagatggattaaattagctctcaaataaacaggggaaggcatgggcatcgaatccctagtggattctaactctgctgttttccacttcttgaacctttaccaaatgccctccaacatctctggattttgactgggaacagactctcatactgagagaggaaaatctggttaagagaatgaaagcaggtgatcctcttcacccagccccatggctgggaggcagagggggaagaacgtagcttaattgaaagaaaggaatactgaaacaacccaaattccctcatttgtatttgtatcacattccttcatgtatttcttcactgtgctccacgcttcaccctggaaggatacagaagtgtctataactcaggatctgccctcaagaaacttaagaaattggtactaggtttaccattttcacagcatttatatgaatgcaccatctcaacaagtctatgatgttttcagtacctatcttgtggatgagagaaccaaatctcatagtggaaatgtacaaagcaattccaaatcagaattgcaaccacatctgtcccatatcatatcccatgacttttcccatataccactttatgcgtgtactggggatgggtagacaatttcaatagaagcagtaagatgcaagacagtagatttcacattgcaagactgattggaagatcatcaagttaagctctttctccaaggtctttgatttacttgaaggttgatagtggctacattcagcctatactaaactgatcctctaaactagacttgtttagaggacaagtctagtgcttgaccttagatgatcttctgatgctctagaagacaggaagacaagtaaagaaattattgtccactggtaaaatcatctctattttgagaagaatctgttcctttataaaataaatatttatttagcatcccctctgtcaggcattcctgaaggcatggcatatctaatgtgaacctgagattttatggagcagagaagaaaggcacccaatccagtcttggggtcacctgattccctctgtcacagcctcaccaagaggcctaattacaatttggctaccatataggtctgccctcagggagagaataggctgtttacatggattttccacattttggcccaggtgactcttcattttttaattaaaattaatcaactggcctctcagtcagttgaacaacctctgatcatgtggacttccatagttggttgttcacagttacctgtcactacacatctaagcatgtaccattttattttatttcattttattctttaaagaaataattgtaatctggcatgaaaactggggcatccatggagaatagaaaagggaacttccaggattttttttttttttttttgagacggagtctcgctctgtcgccaggctagagtgcagtggtatgatgtcagctcactgcaacatctgcctcccgggttcaagcgattctcctccctcagcctcccaagtagctgggactacaggcatatgccaccacacccagctaatttttgtatttttagtagagacggggtttcaccatgttggccaggatagtctcgatcttttgacctcatgatccacctgcctcggcctcccaaagtgctgagattacaggcgtgagccaccacgcctggccaagcttctagaatttttatggtaactgtattcctaatactatgttatctttctagtcttatttagctttcttatttcacccactttttaaaatatcatcatgttggattttatgttatgagctttattaaatcatttctgaaacaactggttattttcaaatcctggtttctccaccaaacagctatggagcatggggaatttactctcttatgacacaagattaatgcccacctcacatcatcatggcaagaaataaataagataatgcatacagtaattagcacaatgaatatactcaatatattttagttgtcattatcttcatcataattattatttttaaagaggaggctataaataagtgcctataagctctgcctaacggggctaggaaaagtgccaaagaagacataaattttgagcagacatttaaaagattctcaaagtgacaaaatggggaagggcattcagggaaggggaagagcaagaacgaattcactgtgggcaacctcagagaactgtgggcagaccagtatgacacggcagcaggtgacagcagaggggttctctgcctttccagggatttgaaccataggttggttcataatagcccatgtgctctcagactgtagtgtgcattggaatcatctgcaaggcttgctaaaatgcagagtctcagggcctggtctcagagagtccaattcattaaatccaaagcaggtctgaggaatctgccgttaattaaacacactcccacggcaatgctgatgaaagtggtcttcagctcatgctttgagaaatgctgctccacagttttctcccatccgcctgctgcagtcacacacatgtatgcacacatacacacacacacatgcaaacacacacatgcgcacacacacacacacccctcctccccccaccttatcccaactccacgaatgggtcgaatattagtcgagaattttctgaaaggcctttctgatcgtgtctctaccctccagttctgcttctcctcaacccttgttcctgccagggaaatacagaaccatgacacatgcggtgaacacaaatattattttaatcttgtggctcctgttattgcaagtacccgggcaagttctccatgtaaaagccagggtgaggtcaggaattggaaggtcccagaagaggtgaggtggttaaatgtaatgccaacacggaggtgggtccctcccaatcccaagcccatctgacctttctctccctcttcccacagagagttgtctgcactgctggtctcaagtggtatcctcaccctgctctgattcactgtgtcaaaggctgtgaggtgagtcacaaggaaggcactcctcagttccctggaaataatcctgctgttgttattgttattgttatattaatgttggctatcctttgccatacctactgagtgttgaaaatatccatttagcagacttcttggacagggattagcagccttattttacagatgatggaattgaggcacagagatataaagaaacatactaaaaagcatagggaatgggtaacagagttgggttccaagccaggcttttgtggctccagagcctgtggtctacaaaatatgggatctgtaagaaaggaagggcagggggctataatgatttaccatctagaatatgctaatgttggaaatttaccaacattgttacatttaacctttacagagtcaggtgaggtggttttatttttaatttccattttactgatgacctttacttgcagacctattccttctgccccacatcttagtcatttactcatgcctcaatcccagaaggaatatgaatgccttagacctaaccattgagctgaagtgaaagagcctttataacccttaaattctatgacttcacagttgagccattccttacagcttggaattatagagatctgtctctgtgtgtcagtgacaagcttgggaggactcaaggagcatggttcttgggagatcagctgtgtcctgaagggagggctgtccacggaactcaaagacatttctgcacatcactctgccccttgtggctcttcccagctggcagtgaaaaagcggccccaaatcccttccaggtggatggccaaatctctgtggttcatccagagcccactgaggcaaacgcaggtgaaaaggatcagaccatgccctagaaaaagtcgtatctgatgaaactcttagaatgccagaaccagaaagactcttttacctaatctcaactaatcttttatttttaaaatgggtaaacagagacccaggcagtggctggatctaaaatttgatggaatgccaaaactgggaaggctcttaatttgatctagctctattttcttggtgtatagagtagaaaacgagggccagagaggggatggaatgtccaagtttgcacagcatgataaccacaaagacaaaacgtaagcccagctcttctaacgtccaggctggtgcttttctcctgctgcctgcctatgatccattccctgatctgtgtcacaagacaatccctaggttacacatttttttctctgcattgttgagggatttcctgagggcacttgacattgtacttgactttaggaaccccattctctcaggcttcaattaggaatggcaaaatcaaagccaaggccctgtggctgttgcttacttctgtctttttggatcaatccagcattttgggaaaagaaagcttgagttacctgggcactcattctgctgagttggcggtctgggcaaccagtgtgacagcggaattcaatccctccttggactcagcagtgagacccaagagaccctcacctgtcagactctgagccctgccagtgatgtttatcacctttgcccttgcaggtgcccctcatctcctgtcctctttagctttgttctaatagtgccttgtctggagctgaaaattatgcttagaagacatacaaactctgggactatcaaccttgaatatccagaggtatccaagataaagaaagggtttggggacccctgagcccctgttttctgcaccatgctgggtccaaagtgatcattcactcacttgttcaccaaagcttcactgagaacctcttatatgccagatactgttccagttctgggaatacattggtgttagtccagtgaaaatagtaactatgctctccttgagtcatctatgatatcttcttgcctgtcatccatccatccatccatccatccatccatccatccatccatcgttttactaaataaacatttatggaatctatatttgataaagttttgcacaaatacgagacattttgctagcaatctaggatacagaaatggatgatgcgcacagtatagtgaaggagatagacaattaaagagagaattttaaaatcctgaagagctatcacaaaatcaaatacaagaggctatggcagcagacagcatcctgaggctattaggggtggcattttggagaggtaacatttgagctagatcttgaaggatggtttgtttgtctgaatgcgttactagtagaaggagcaacatgagataaaccagagacaggagaaatctctaagtaccagagcttttctcatattgttccctgtctctagaaattctctcttctccacccccacctaattaactcctactcatctttatgatctcagctgaagcgtcatttcttcagggacttcactgagctccctgtctagatcaaatctttctactttttaatagcatcacaaacctcttctccatagctcttatcagagttgaaattggttaattagatgtgtgattatgtgattaaagtctgtctcttcaccagagtataaggtctggaggggtaggaactatatctatattaattcactattgcatccttttccttagcataatgtgtaacacatcgtaggaattaaatacataggatggaataaggataaatgaatggatggatggatggatggacggatggatggataggtggatgaaaggatatggttgcaggaaagaacatatagggtagagtaactagtgatgggactggagaattttttcagggccaaataaagaagtatcaccttcatttaatttttctcttttcccctagctacttctttatcaagccagttccttttattctaaggaagggacaattagtctccatcattattctgttcatttattacataaaaaagaacataacccacaggcagatctcctgaggcaggaaggaaaagaaagggtttattgtttgttgtttgtttataccccactgctctaatgtggatgtgatgtgttcattctggtggtcacacagcagagtcacacctgaacccacagccatatgcatgcacacccacacaactgagctcaggtcttccttgctctcagagctctgtctagctgtgatcttttagactctagtagtagagtgatgaaatgaaatctggcatcatgagttcagggtgaaaagtttctgtgagtaagaatttggaacagagaggcaaaagccaggaatgccacatgggatggagcttggttctttctggagcagtgaggatgggaaggggagaccactggatcacagatggcatgcttggatgcaaaggtcttaaacaaatgttgtctctttcccatgaatgagtcactgatctttagagaccccaaccagcactttaatcagagtggtttcactttcatctgctttctatattgaaatgtcacacaatatggcatttgatggtgaggagaggggtaggttcactgttttgagaaatcaatggactaatctggcctctttatttcattagtgggagtcctgaggcctagaggagataaggtcacttaaccaaaaccatgaagtaaccatcccattggctgaggttgggaggactagaacccaggttttctcaatccctgccaactgcccttgccactatgccggtacaattacattccacttcagaaacattattaagagccaaagttgtgtgcagccttaaatgaggtgattgggagtcaaagacaaactagacattgcccatgtccatgaagagctcacagtcttgcaccagctacagaaacataaacagaccacagaatacaatgtgctagcggttgggatgaggaaatacaagtgactggggaatccaagagactcctggactttcccctaataaggctctgggttcagataaataatggcttgactctattatcttttcttcatcttgggagtgtcctggggtggagaaacacacagaagaaaagaaataaatcagtatatgccagaacagccaagagagatgaagtaaaaaaccatagagccaacttagatttaaatcacttactctgactgtgccaatgtgattttgggcaagtccctgtctttgagtctccgcatcttcatctgtagagtgagaaaaccaatacctacctcacttattgtttggagagcaaaagaagaaaacaaacatgtaaaatgtgtgacatcaagtacatctgccctccttgtgagagggagcccactatcacacacagaccatggtgccaaattcctatgagttcttacattttatcttaatgcttcttgggcagtttacattcagcttcctaacatatttgcatatattttattacaaattacgtttttaattacatactgctgaaaaaagtgggagaaggaggcttacatttcctggtcatttctttgagtaaaatgagccctctttcaggaagatgtaagccatctattttgtggttttgcatacccaagcacacaagagtatgtctctcagcataaccatactctagttggaaaaaactgggtaagagtctttatgaatggtagaaagaaagataagagtctttatgaatggtagaggtgataactcattcaagggggtgttggggatgtgaagcctggccagctaatcgtggaaggctgtgaaaagatgacagacacccgaaggactgcagacgtcagctcccactcactccaggatgctaacaaggcctcatttcctccttctgtctccctttccagcccttcatgggagacaattattgtgatgccatcaacaaccgagccttttgcaactatgacggtggggattgctgcacctccacagtgaagaccaaaaaggtaggccagtgtgcactcctcggcagctgcctcctgcccacttctccagcttgtggggccaggatcactccttcatggctggacaacccttgtcctaactctgccagcactgtccacacgctttatttctttttttaatttttattcttttggtcagtagttgaactaatatcataggctgggccctggttgatttttgcagatgtggttctcaaagcttagaattgggtacggaagcaggtaataaaactgcaataagtactttcggaaaggaaggacaaagtgcttggggggctaggcaaggggtcagagaaggcactctagagcaagaggcatctgcactgaaacttgagggataagaggaaggggtgaggaggtggtcaaaagaacggtgtctggagcaggagactggcatgtaaaatcccagtgagaacacacatttttagggggtagggctgaagtctaggaaacagaaaatagtacatccctaatgaggtcatttacagtctttgagcattttattatctatcttatttgtcacacctgtagaattagagaaagatggtcatggtcatggtattttttctttatatcaggacacacccaggagtgattcaagtgtttatagtaaaccaaagaaaaacattcgatagatgcacattaacccctcacagaaaagtggccacctccatttttctccgactgccgctgagaccagagtgaggagccccagccaagggttgggagggaggtggtaaccctgctagcctgggctgagaagcgttcttgtgatgaatgagttaatggaaaactatttctatttttatattcatctgcagtcagagctgaaagatcatttcatctgtgtcattttaaagaagggggaactgagtttctgagacaggaaaagcaaagaatcatagtcaatcatgcctaaagagccctctatgactatcttggcccaaacgcttcattttattaataggggcactgaggcccataaaagaggaatgatttgtcccaggtgacaaagtgaatgatagaaagagtgaggttcctggattccaatcccagtccctttattttgcaacatccttaggagagttggtttcttcaagaaagaatctctgacccaaaatacaggaacaaatgggacaagacccaaggaacacattctaatcagatggctgttagttactgaatcttttggttgaggaataaaatttctgggattgtccaggatcagtcagtcccaggtgggcaacagttttcagcatgcctacccttctttggtttcggtttggttttgatttttgattgataggacactgaagacgtacaatttttgcttaagtagagaaaaataaaattcattttctgttaaggaattttatcatttttttctaattatgaaataatgcatattggaaaattcagaaagaagaaaacaaaagaattcacttattatcttaaaaaccaaagaaaaccactgctttttattttggtgtattttattctgtgaattttgttaagtaagtgtgagggtatttttgtcgtctgtgtatatatcactgcctttctagcttgcaatcttgttttgcttagttttgtttacttagcacaggaaatcttagacacaagaattacttgcgctgagcacagtggctcacggttgtaactccagcactttgggaggccaagatgggtgaatcacttgggaccaggagttggagaccagccagagcaacacaggcagacccttgtctctacacgtaattaataataataataataataataataataataaagtagccaggtatggaggcacaggtctgtagtcccagctacttgggaagctgaagcagaaggaccacttgagctcagagaggtcaaggctgcaatgagccatgatcataccactgtactccagcctaggcgatagggtgagaccctgtctcaaaatttaaaaaagttctgatagtagtataaacttctcagctgtattttttgctgcattgttgtttattatatggctgtgatgtatgctaatttatgtaaccatttacttcaacttttatttttaacttttggattatttcttttttcttataattttaactaaaatgatgctcatgagcgtctttgcacataaaatacttttatagctctaattatttctttatagttgattcttacaattggaatgccaagggagggatgtaagcatatttaaggctcctgatacctgtttccaaatgaatatagtgaacaatattatctattttcttccattggagtcagccacctttgaacgtgaatggacgatgaagtttgtatttgaaatagaagtttttacagaattatggctccatctgacaccaacggttggagaaagagcagctctgtttaaaataatgttcctatctattgtaacttaggtactaaaatataaaatatgaagctgattttttgacagagaactttccaaaatggattcctctctctacagagtgcattgtgggaatatgaagtcatgagaccagcctcgccaagatggtgaaaccccgtctctactaaaaatacaaaaattagccgggtgtggtggtgggcacctgtaatcccagctgcttgggaggctgaggcaggagaatcacttgaacctgggaggcagaggttgcggtgagccgatatcgtgccactgtactccagcctgggtgacaaaacgagactccatctcaaaataaataaataaataaataaataaataaataaataaataaataaataataatttggaatccacacctgaacctcaatctcatgacttcatagtcccacaatgcactctgtagagagagaatccatttggaaagttctctgacctcatgatccacccacctcagcctcccaaagtgctgggattacaggcatgagccaccgcacctgaccagattccaaattattatagtaactttaccgtatacatatatttgaacaccaagccaccattttggctctctgttcccatactcagttccagtgcagcaatttcagactcccaggccccaagataagcacagactcttcactaaggaaccccagaaccagttctttgctagctctgaatgcatttcatactgttgtttcctccttgtctacccacattataaatgtagttaggctttttgtgttaagaaatcctcttcttccactttaaattcttgtttcttcttgttggctgagggtgcagaatgcagatggccaagctgccttcatccaatgcggtgaatctccattgaggatctctgtgtgctcagcaccagaccaggctgtggacagtatttctgcccttgtgaaacgtgtagtctattagaggagcctgttattaagcagggagccacacaactattgcatttaattacttttgtggaagaggcaatgatgagaaagtgtgagattttatggagaacagcatgaaggtccgagaaagcttctctgaggaagggacatttacatggagatctgaagagggaacagagtcttcctggtggaggtgaataatggttgggggtagaaggggaaaggtctcttaaaactgtacatgaagtatggattagagagactaagggcctcctttatggcagataggactttgccatcattatttcagttgtggacaggtgtttggggcttttcagatgcaagattcctagaagtcttacttctggaaaagtgtctcagattaaagtcacacttcctacaatttagatttcccagtttgacttttaagggaactccaacttcttgaaacttttctcctctttcttggacacccccaactactccctgcagtagactggcttaaaggtggtgctagatggagaaaataaataagaacacaagacttccctaagtgaactattgcatatttcagacactctgcgagacacttggcctctgttatcctctttaatcctcttgtcaacacagagaggtcactattcttattcccatcacacagatgaaccagtctgggcttagagtacatatgggacttgcccaagttcacttggcaaatgagtggggaagcccaagtttgaacccagttctatctgactcaaaagttctgctttttctcctgcatggtgctgagtttcagaagaagaaagcatgcagggtgcctgtgtccttggcacaccttggcatgaccctccctgttctggttggaaacatttcaccatgagcccagactgccagggaactttggcaaagaggagagcagcttttcccagtagcagcaaagatggggtcgggggaagataagtctcccagccttcccatcatccctgacatccctggcagcccagagaggagtttcccgtgggcatccacagaacagaagaaagttctggtttttgtttccatcttccaccgcaggaagcctctcagagaaggagagaggttactttcctttcatgcctctgcccttacctgctggacctgtttaggtcccacttgtcccctcagccccagtcccatatcaagagacaatcccttcccttacacacccaggctagcgctcagagaaactcacccctgggtgagtttcaagcaccttcctaaatcacaggaattcagttaactgagcacttaatatgtgcttcgctgtggcctggatctctgtgcatgtcatctcacttaaactccagaataattcagccaagtagagcactgaggttgagggaaatggaataatttgtacaaggtgatagagctatgtttgggatttaggatttcctaactgaacaaatggtaatagctaagagttattgctttgctttacatgtcgtttcatttcatcagcacaataaccctgttgtagatgttgttcttttttctttttcttttgagatgaagcctcactctgtcacctactctggagtggctcacttcagcctcaacctcctaataagctcaaatgatctttccacctcagccttccaaatagctgggactacagacacacaccatcacaccatgctaattttcatattttttgtagagaaagcagtctccctgtattgcccagactggtcttgaactcctgggctccagtgatcctccagcctcagcttcccaaagtgctgggatcacagatgtgagccgccatggacggccctaggcgttatctttttaatcctcattttatagatgatgaaactggggcttagaagggttaaattcacacagttagcaagtggtaaagctaagatgcaaaccaagagaattcaagctgcacagcacctgcctctaaccccttggaacatccttttgcagcaggcttgtgtcttgcccaagcgtcttgtcctgccccttgtgggtgatattcttgcttcatagacctccaggaatggagttcttggtatgaactccaggcccagagttaagcactcagcatcttctcccagacttccttcttgccagttttccacctaaacttcttcccggttcccagggctagggcctccgtgatgccttggcccagcatgatgactgtctgctcccttcattctccctcccttatttgtctgtacagacaccagctgttccccacatccgccttatggggtgacctgggcccggctggcagacaagagcaagacggtgcaggaaactctgtctgacaggggtgtccaatttcccacccagacacctgcctgcagtgtgaggcagacaggaaggggcaggactcagcctctcaggatgtcagtttattattttcctgttggagccttgaggagcctcaaatacaaagcagatttccagaatggttgctccagtggtttcccttcatgacaaaaaaaattcaatttataattggaatcattctaagtaagcacgtgttagggtgtgagggagaaaagggaaacaaccttaacatattcaacataccaaagctttctaaggtgtggtggcctggaacactagttgtggtcatgtttcagatggctgctaagagagtgattcttatagatgtctggggagttggggtatagtcctggttctgtgacttattaactctgtgaccttgggtaggccagactcactttgggtttttatgttttgatatttgaattagattcctgtctaataactcaacataacaaggctttctaaaaatgtgcctaaggactcttcacatggcttcctggatgagttggtcattgagcaggaagttgaaggctagttaagactgagacctacagagaataagaagaggttaatcccagaaacacatctcagcacaggatggtgcacccaattcatgcaactatgtgtagggctggctgcaatatttgctaaatgacagatttactaaatcttaaaccctacctaaatgagaacatggtttcttaagaaaagacattatacccaacatgtagcacattggtcattggtctaagaaggctagtgattctataagatatggaaaaataatcaacatcattacatggagagcaaccttcttagcagagtgggtgataacctacattgacaaagggctggatgttgggtagctgacttggggatgtacatcagtgtctcttcttgacctagcagccagaataatcctttttttttttttttttttggaaacagagtctcactcttgtcacccaggctggagtgcagtggcataatcttggctcactgcaacctccgcctcccaggttcaagcaattctcctgcctcagcctccagagtagctgggattacaggcacacaccaccacacctggctaatttttgtatttttagtagagacggggtttcaccatattgctcaggctggtcttgaactcctgacctcgcagaatagtccttttaaatccagtcagatcatatcacacctcaatgcaaagacatacagttccttcccattttacttggaatgaaaaaccaaagttttcccaatgcctacaaagctcttgggaaaatgtgggtgctttgcccacccacattgcttctctgactttgccccctttccactgtctatgccttttcttattcacctctggcattctggaccccttgctatccttagttcagctcaggcatccttctactttacagcctttgtcactgtgtcactggcaatttctttggctaagaaccctcttctattcatcctcatgactcactccttcacctctttcaagtctttgcccaagtgccatgttctcaatgactccaaccctgaccacccaacccacatcacccctggcactcccacactcatttgctttgccttctgtttttttttttctttctttcttccctaatacttatcaccctggcacacactataaaatatatttattatttatgatcagatgacccctactcctcttgatgctagaatgcagaattaatgaggataagaatgtgcttcttgtttgtttattgatatattcaaatttccagtgtacctcattgtttcctgtccaatagtaggtactcaacacccacaaataaatactttttgcatgagtgaatttagggtattacctgctgtgtgacagatactgtactaggccatgagcaagaacttggtcccagctgaatgaattcatgtcttatggatgagtagccagacatttagagtatagcaagtactcatggagacacagcaagtcaggaggtcagcgaagtttcccagagaaggcaacaccaaaggcaataaatgaaaggtccagaaggtatttcccagatgaaaggagtaaggaaggaccagagataggggtgggagggaaaagggtatctttggcgagaggaacagtctgtgcaaaggcccagacaccagggaaagtgttaaggaaattataattccctgagtatgcccagagcatggtgcaaggggaaaagggataaaagataagcctagatggataagcaaggcttttatcacccaagccagggagattgaactttatccagaggccagtggggggtattcaggaggatttgaagcactgagccagtgtagggaatcccagaaggccttttggaagagagagtagatatgcttaacttggaggattagtaagagacaacaagcagatggctaagcacactagactaactcttccatgttcaaaaattactggcttctggaatgttattaaaccctctgcctccccctgccccccgctttggaatgtagccctgactttttccttatggatgaagtaggcactcattttagcttggtcctatgatggaatccagcccttctatcccaaaaacttatcagcatcattatcaatgttattaccaccaccatcatcatcattacctcactgtcaaaaccatcaccaccatcaccactagcatcatcatttattgagcccatattttatgccatgcattattctaatgctttacttgcatttcatactttacccaacatacttctgtgtggtaggactgttagtacctcctttttacagatagagaaactgaagcccagaaaagggaagtaacttgccggatagcatacacgaaagtcagcaacagggcaaagactcaaacgtgtctttttctcctctaggccagtgctttcctctaatttacccatattttttccactttatcctccatttatccacatgaccactttatcttcatttaaacaagcttcgtatacattaactgttccacgttttatgccaggtactgtatccatcctacctttaagaaacttacaggggaatcctcgtccttggcatcatgcctttatctacttggtactcatgaaatctttccatcagcactgtcaagaccctaagactcaaccaggtgaagtgacctgccagtgatgtggccccccacagccagcaggagacacagtcaaagctctctgaccatcagcacaacatgactgttgtccctctccaaccggcacccccaccatgctctgctagttacctccctgtggagtctgagtcagaatccagcccctgcatgtctctcagctctggacaggatctgcagccagggccttgtggtatagttgcctgagctgcattcctgagccactcacactcacagatggaggtgttagcctcagcagctcacccagagggagaacccatgtgccggagcaccatctctagccccgagtaaaaacaggagagaatcctggcccttaatcatggacctggcttgctaacacaatcccagagtgggtggccaagccatttatgggacagcctagccacatggtgctgagaatccccaaatgtaaactggccaccatggtgttcatgctgtgggtggtaggttttcttgggaggccgcctgggggagaaggtggggagctgcttggggagtcagggaatctggcagttgggctcagagctctgattttatcaagatgtgattcttctctccatgcctcagtttcttcgtctgtgaagagaggaccctgactcctgctctgccgtcctcctggggcatggtgctgaggagtgccaggccacctgacagcccactgattcatctctttgcatcttagtttcttttaagatgtaaaatggggatagtaagaatagttacctcttagcattgctgggcagagtgagtaagataatgatgcacattgagtttagctcagtgccaggcacataataaggataaaggttattggtgattaaaaagacaaagcagcagtcagccttttcaggttgtgaagaaaataccttttttttcccccttctttttactctcacttgctgaaaagctctcaagtgtttgaagtggggtttggaatcctgcatcaccaactcactgactggtactgaggcctgagacaggttagttttgctttaaacattctgaagcctctattttctcatctgcaagatggggagctaataatgatagtctcccaaggtggtgcagagtcagagagctagcatatagaaatcatctggcatgtggaaggccctttggaatcactagtgtgtgtacaatggtattcaccgcttgagcctgcatgaacaggtgtccccaagtcctttccaggttagacctagcaatacctgaaaatctccacccttttcttctcagctttatatctgtgataagtgaggaagcttgtaacagaggaggctctgaacaggcagttcacaaagaggcaagaggagggaagaaaacaccatgtgtctcctctacattgggcactctgagagctggactggacctgacatgacttcactgactcctcactagagcccttcgaggtcttgataaagacccttgtcttacagatggggaggctgaagtccacaagatgccagggacttgctgaaagtcatacagtttctgtataaagtctacaacatattacttacaagcatgtagtggagacaaggaggctctggataggcctcctgagaccaaccctcctaggctttgtcatattctgattgagtttcctccagtgtttatttcggaagtgctgaaactgcccagactggcctggggaaggaagaaaaaggtgacaccaccccagcatagccagagtgccaagaccggcctgagaagctaactggtggcaaggccttaccagccaacaattttggagaagctgattgaactggggaggacaggaaggggagcattcaagacagggtctgtgaagaaattctatgtttcaagttcctttctggccaggtctttgccttctacctttctcagactgagaaggattttcagccagatgagaagttagaagctatgaaaatcaactcttattataggcagggaaacaagctcagagaagggaagtaacttgtccaaagtcacccagcaactgactgtaaaagtggaggctccctgacttgtattctgcctgcatattcatgcattcatttgttcattcattcatgggtcattgaatgcataaagactgagttcaataacagtcatggtccctgcccagagtgagctgacatcgaagtaaagaagtaattcagtatcagaagggtgcaaaaataagatgctgtgatatggtatgaaggtgatggtgctattaggttggtgcaaaagtaattgccgtttttaccattactttcaatggcaaaaaccacaattatttttgcaccaacctaatatctttggtcagactactgagggaggtagtgatacttgcgaaaagacctggacaatgaaaaagagctggccagggaagagcagtcagagtggagggccattagtggctaaggacacaaaagtaggaaaacagagtatctggggaaccaataaataaagaagccactgagagtgaggaggagaaggaaaccatgtaagatctgagacttatgtagaaatcagatcatgcaaggccttgaacttgtggtaaggactttggattttattctaagacatataattttttgaatgtttgccttgagtgaggtgcagcagaaagcacaaaagataaagcagacagacatgaaaccatccctcatgggtgtttgagctcaatgggaaagtgttacagacagaatattagagaagacattagaggtaactggatcgtgctaatgatagaatgagagcaagggtaggagacggggatggataaagcatgggggagttaaggacaaggagattgttcaagtgtggaaggtgggcggtgggggacaataggcaggaaagatcgtgaaatacgagtgagggagaaatctgattcagcatatatgtatttggcactgagcatctcaagggtgttaggccatgtgctgaggcttttgcatgtttcttcttgcttgatcctcagaaaaaatgcaacatgaaatatggtattttaaaaatcctcctttcatagatgtagaacctaagatcatgacagtggagggattttcccaaaatcattcaacgagtatgaagcaaacaaggatcccaacccaaaccttttggctttcatgatagtactttccacactctaccccagtggttggattttgacttggctttgccctcagtttccctgtttggactggggggttttctctctatgccacttccagttctaatattctgtgcttctcttcaaggtaaaatgaataggggcaaatattctagattctagatggaatatcctagatgtattccacaaagtcacagaggatggaaagtaaatgtcctaaacagagaacagcaagtagctgtgagcaagaagagaggtgctgcttggaaaaggggacggtggaaatgcttaccacagcatcaagcacttatgaatttaaattgaaaagagaaacaaagacttgtggtagccataagtacaaagagtcagagagagatggatcaatgaatacaaatttattcattctgtggcttagggcctgtgaaaacaggaataaacaagattgacctggtccctgccttatgggccacagaattggtgggaggatagaccaaaaaaataaaggagagggagcgggagagagaaagagacagaataattgagcacttagcatatgtcaagcactgtgtgaggtgttttcatgagttatttcatgtattccttatcacaacctcaggaggtctacacttttatttttcccattaaatgaatgagttcattgagactcagagaaattgtcacatgttcaaggtcacatctcaagtagatgagagagctggggcatatacttaaatctttctgatgttccattctacattttaaattattgcaaactttcaggatggagagaggttgggagggagggaaagaggtcaaagaggcagagaaaaaagaagaggtagacattgagaatgagtccacaagtacatgagagagaaggatagaaacaaagattctctctgagactacgtgaccacttggagaccctgcccaggcaggaggcaaatgaggtcattaaatccatctgcgcagatgggaggctctctggggaaagttatatgcaaatgtcatgatgcaatgaggtgaaatctacttgcgttagttcaggtggggactcaagcaggaactgcactgtgctctttggaaagatagattatctcctggatggggaagacactcactctgttgggctcttcctatcagtttgcagaaaggaaagctggccaaggtcacagagcacatgaaggaacgaactggcaactgtattgaactcagttctctcacttgttcgtatgctaaaatctgcttcccaggtccttcaaatttggtgcaaaaccaccatgcgatctattccctactcaggattccaagcctcccagaaggtggtctagcttccctgagacatgctttttgttttcatcattgcctactaaagtcaaagtgaccagtatgtgcagagacttatgttttctcaaaagacacttccacatcctttctttcacttgatcacttatacatcagatattccattacacagttctattaatcaactttgctacagtgcacgacaattttccacccatgattttactcagctcctatagtttaaaatacaaagtgggtcttattatatcagctctacatagggacctgaggctctgagataagtaagtagcttgttttactttaaataccagacttgacacttattattacttttggcaaattcttattcctttctgagcttcagtttccccatcaataaaagggtgattgttgcagcatctgtcttatagagttgtcaaaagtgttttcttgtttggaaatcactgagtacattgccttaccccatagcaaatgcctgacccatagcaagtgcctctgcaaatgaaaactgctgtgattatgatcatggtgtgctcgataaaagttatcaccaggatagcaagaagcagagccataacttgaacttgaaccttctgctcctcaaatccagtgattgtatccctgcgctgcactgcctttctgatcattactgcttcagaccaaatcacctgattcacttcttctttctgcaggtcaccccattccctatgtcctgtgatctacaaggtgactgtgcttgtcgggacccccaggcccaagaacacagccggaaagacctccggggatacagccatggctaaggaaggacaagaagttgtcaaagaattcccaacgccaggacccacatccctttggtattgatttcacagtcagctgctcaacggaatggcctctccacaccagggatccttagcacccaaccggtctgcctttaattttacccaggaaggactcacattggggcgaatgaaccaagtttcgccatgctggatgatgaaatggattcccatcccaaagtctgagatggattgcatatacagtgtgcagtcccagagcctcctaaaattctagccatttgtcacacaaccacagcaagaaacgtgttctatatctagagtgtgcccatctgtgtttagtacacatgcatgcatacacacccatacaaacatctgtgtgagggcagttctggagatgagcagagagagaccggaataaactcaatcttttctttcccaagctcctagccaacactatccttgggagaaagaaatttgcagaaactgctaagaccaagtgtggagatgtcaagctagttcacactctgaggctcagaatatgtaggacatgcacaattgtgcagtcctttgggattggaagtgaaacagtctgtgatcccctaccttctagggaactaggacctaggaagaggtaaagattatcaggtatgcaaagcgccccaattcttctgctgccatgggggattttaccccaactccagggttcgaggccaatctgagaatggcttaggattgcaatgtcaaggtattatatcagccccttgcttgaggcttgaggtcataatatccctctaggacttacctgttcccccagatcttgccttgggaccacatttgctgctacttttcctgctgctctatcctatacattgaataatccaagatggtagaactaggttaggaaaaattccacacaaccaaacagtctgccttaaaagtgacccacatttttccatagctcctcactttttagcccttctgcaagagaaaaaccctcatgggtccacatggtgagaagttaagtttcctgtaagtgggcctctcaccctggaaaggagttgagggacatcagatgctggaaccctcactgaaagtccagaatgtctaagccagtgttagattttgtaaacaagtggaacagtgttaaatttctatgatgttggagccatccagagactactggaattgtcgagacttttggattattatccttatccttatcctaatcttcctagcccttcaggctagagtaggctttgatcctgagaaccttgctgttgctctgaggagatataattctgggagaaagaatcttttataagaacagtacagattgttctcaagagggccatcagaaggaagccaaagagttcacagcctcagcaccaacaactcaacatggtcatcatgttttctatatggtttttccagctagcagtactcccttccatacctgtgactgggcagtgcttttctctctcccatgtctagcctccaaaagttaagtgaaaattagtcaactgcacgtggaagcccccaccactttggggatctctttatttcttttcagccagggacctgtccactccctttgaattaatatgggaagaaattaatacaggatgaactggagagaagggttgagtgtggcatactttctgaaacctggagctgggaattgcggagaagggaaggtctagactagttacatcacatagggattactgtaaatcaagtcatctcaagtctagtgaagacagccaacagaaacaaaacctagcatagggatagaaaataccatgcacgtgtgcagccccacctaattcctgcatccaaggcaggtgttgttaatctatcatagcacttaaaaaaaaaaaaaaaaagagaccaaaaataactttaggaaccaccatattatatcactcccaatagcactgacctggtgatcaaaaacacttgagaagacatctattggccatctctggccaattacactaagaaacatatcaaggtgcttttggcacaggtgcccacaaatacggatgcagtgctgagatagtttatgagacttgtaccatttcacaaactctgaaattgggttccatattggcaaggctgccacagttgttaagaataatcctctatgtttcttcctcacaaaaccatatctcatttatatccagaccattacttcactataattacaaggacaaattattagcaagaaataagaatagtattagaagaattgatcctattttgaacccctctccagtatcttcacactcttgtcaactctccaggcctctctcttgccctgagttatcagcctgtgtggtgttaactaccttagaaggtacaagctaagaaatgtaacagtatcaaccctcccagttgcttaattatacccataggtaatacaaaaagctctgaagacccaaagatgacattactaatgatgtgatttcaggagccacagaagaaccttaccagcttccctcaaatcagtccttatcctctttctatcttcactcccatcatcatctattttcacactatccagctaagcaaagattcctggaggctgacttgtatcttcagactcacagagtgaattcagctcttctgaatcaagacccacccagtctctttcattcagacctgttgctaacaaatttatatttgccaaggatattaggcaaaagaggctacttgattggtggccaacctcgtgcccacatggaaggtatctttaatagggtcttttcaaaccttagtggaggagggtcagctcaatttgggcaatgcatttgttcccagtttcattttcttcctgggaattaactcgtcatttcattccttcagtcatcttctgtgtaggtgaccggagcactgagaggcagctctgatgcactattgtgtgtcagcagctcaaaggccctaaaacactgaaggttctgcatctgaagtattagattgttagcagcaaaatatgaaagatgaggtggacagtcctctaagccctatttagggaagcttttccaagccacaatcttaactacctacccaaaggatttgcattacccccagattctgtgccaacaaccttttaaggaaatacagtccttgggaaatgagttttgatggtgaattggggtgttaaggaagggaaagattgtcatagatggtagggctttgaaaatgcagggtatcagctgccactcctggcttcaacacattgagtcactgcctagacggttctcttggtcttattcccatcctggccaatgcttaaatactatttgttgaaaataattctttgagacagatttcagctacctcccttccaggttcgatttaacttggttgtaattgtcaatttgttgttataggtcttacctgtgtgaaagaaagaaaaagaaagaaagaaagaaagagaaaggaaattataaggtcaagttaacagttttgaggttttgtgtttttttctggaactacttcaagtgagaaaataaaaaaaaatggtgacaaagctgtacagatagagataatagaagacaaagagattaaaaggaaataaaaatgcatgattaaaaactaagaataaaaaacctatttttatgtttcctaaaggaaattgtttattctacagcctcagtaggtagacacaaacataaagatttccctagaagacatagagtgggatttgataacactgtctgttattttctgtacattgtggtaggtccaggaaatatgacattttcccccttgatgtgttattgttgttgttgggtggggtgggcattttgtttatttgtttggtggcaatcagtggtagtagggagtgggagggcttatattggtttttccagctattaaggggacatattgtgtcgttgtgcttttcacgttataaaatgtttatatttaccagtacagcactgggctttataaagactgcactcagaaccacactgcacagtccagttttttaaaaagctgctacatgacagacaggtaatcccactgagtgagttttgagaaacaaatcaaacgaagtaaacaagaaacataaaaaccaaatagcaaatgaataaaagcctgttcttgtaacttattcaacttttgccaaattcctaccaatcacttgctttttaaaagaaatgtataatagccaaaagagaaattatgtccctgttgtacagaagttagaatttttgactccaggcagcagtttgctcagtgatcttgaacaagttatccaattgcctctacatttgcatcagtttctctagctgcaaaatggggataatactatatacctacctcacagtgggagggcaggagattttgaggccctgaggttttaggtgggctgtgagggccaacgcttgacacaaagtccatgggttattattcaagaatgcacaggcccatcggccttttagaaagacaagacagggagtgcttgtttgatatttcaaggaataaagccggagctcctgaattgtagtccaccttaaaagagagacctgtattggagaatattttatttttttggcaaatttgatcttaccctttaccagttctataatttggttaaaagctgattatgtcctacaatgtcaaagtcagctaactgtcgtctacttaagacttctggtcatttccaacttatagaggaagggagtctctaaaatctcttcttcagaaggcacctcacttctcagacttaaaattccacatcaagtgttccattaaaagaagataaggcattctgagtgcaaacaaatgggggcttcttaaactacacaccagcagtcagtgaggaaaactttgaacaattattgagttgctttcttgggtctctataatcaataacctgtctgcagatatctatctatataaagatattatatataaatataaatttacatatatatgcacatgtatatatagttgtacatatatgtgtgtatatatatacttaaatgtaatatttacaaaataaaactgtgatctcgtctagagaaaatgtattcatattacaaactgctcttccatatttatgtaccatattatacctttttattattgttataattattatgggtatttctaattaatatgatgttgaaacctgtttggcaccttctggaagctaccaaaaaaatgacactccattgaagtgcttaaaagctgttctcataagaattcttctggcctattgtaaaaaagaaaaaaaaaaagaaaaagaagaaagacacaaagaaaataatctaaacaccaaaaactaaacacaattccaatcctttttctgtacctcacgcgcataaatttgctgctcctatttttttttctgtttatgtgtttttatggatctaagttaaatcttttggcaatatataaaaatgtaaatagtaaactttatttattaagaatgtcatcttttttaatttatatttacacaattgttcatctaatttattttttctatacagttttaaatactcagacatattttgctgttcatgatatttttatcctgttctcatggatttgttttcccatactgttttctctgatctcaattacaggttggatctcacaaataataatgtcagagacagaaatattttgccactgttgattactatactttaaagttctatattatgaaaatatataatagcttgtacgcttcag

SEQ ID NO: 194 - DNA, 4686 bp, Homo sapiens
ctccccagcctgataaaggtcctgcgggcaggacaggacctcccaaccaagccctccagcaaggattcaggttggtgctgagtgcctgggagggacacccgcctacactctgcaagaaactcaaaaagggagatgaggggatcgtgggagggaggtagggagggaggagggtgccactgatcccctgaacccctgcctctgcctccagagtgcccctccggcctcgccatgaggctcttcctgtcgctcccggtcctggtggtggttctgtcgatcgtcttggaaggtaaaagtgggatgggagaattgcggagttggagatttggaagagtgaaggtggctacaggcctggggtcccggcttagaggacctctgagagctccggggccccttctgggtcgtggttgcctcatcgtggtcgggtgggtctccaggttctcccaggctcagtcccgcaggcgccaaatctgcgcaggagagcactagcaaccgatgacgtattgaggcccacacctctgggattggctgtcctgcttcgacagccttgaaagtgggtaagctgggtggggggctctgggagaggtcagtgctgagtaaggcaattcccagcagcttgagccccaccaggtcactccagtattcctccccattctttttttttttttttttttttctcttgagacggagtctcgctctgtcgccgaggctggagtgcagtggcgcgatctcggctcactgcaagctccgcctccctggttcacgccattctcctgcctcagcaggactacaggcgcccgccaccgcgcccggctaattttttgtattttcagtagagacagggtttcaccgtggtctcgatctcctgactttgtgatccgcctgcctcgacctcccaaagtgctgggattacaggcgtgagccaccgcgtccggccattcctccccattctaaccacatgatccccaaggatctctatccatcccggtatcccaacctaagggggttccaataacaaatttttggccgggcagggtggctcatgcctgtaatcccagcactttgggaggccgaggcgggcagatcacttgaggtcaggagttcgaaaccagcctggccaacatggtgaaacttcgtctctactaaaaatacaaaaaaattagccaggtgtggaggcacgcgcctgtaggcccagctactcgggaggctgaggcaggagaatcacttgaacccgggaggcggaggttgcagtgagccgagatcataccactgcactccagcctggctgacacagcaagactccgtctcaaaacaaaacaaaacaaaaatagctgggtgtggtggtgcacacctgtaatcccagctacttgggaggctgaggcaggagaactgcttgaacccgggaggtggtggttgcagtaggccgagatcatgccactgcactccagcttgggctacagagcaagactccatctccaaaaaaaaaaaaaaaaaaacaaattttgaacccctgcccatcttcctggcaggcccagccccagcccaggggaccccagacgtctccagtgccttggataagctgaaggagtttggaaacacactggaggacaaggctcgggaactcatcagccgcatcaaacagagtgaactttctgccaagatgcggttagaacccttcccagggcacgggagagctggggtgtgtttttgggtggagccctggcagatggtccaagatgaacagattgaaaaaaaaacaagtcctggagaggctgacaacatccctctggtcacacagctagatctcaaggtgctcagacttcaaggacagtttccctgactcccatccaggccatattttaaaagatggtcttgggctgggcacggtggctcatgcttgcaatcccagcacttagggaggccgaggtgggctgattgcctgaggtcaggagttcgagaccagtctgaccaacatggtgaaaccttgtctctactaaaaatacaaaaaaattaggcaggcatggtggcgtgcacctgtaatcccagctagtcgggaggctgaggcaggggaattgcttgaaccaggaaggtgggagttacagtgagccaacattgtgccagcctgggtgacagaaggagactctgtctcaaaaaaaaaaaaaaaaaaaaaaaaaacaagatggtcttgcccaggtatggtggctcacacctgtaattccagcactatgggaggctgagatgggaggattgcttgagcccaggagttcgagaccagcctgaccaacatggcgagatcctgtctccatttaaaaaaaaaaaaaaaaagatggttttgtgaggtaatgaaaatgaaggccccaagcttggccagacctgggtccccaggctggagtagcaccccttcctgtgtgatcttgacagaggggcattactgtgagcctcagtttcctctcctataaactggtggttctacagggaagtaaaggagcaggcctacagggtgtctggtacatgtagatgctcagtatatcatgaaacccacccttgccccctttggcaagttagagagtcattcgttctttcaaaaatatttactgagcatctgctaagtgctggaaactgtttcaatgtggggaataaaacagtgaagaacgtgccgagcacggtggctcacacctgtaaccccaccactttggaaggccgaggtgggtggatcacttgaggtcaggagtgcgagaaccccgtccctaatagaaatgcaaaaaaaattagctgggcatggtggcccatgcctgtagtcccagctccttgggaggctgaggcgagaggattgcttgagcccaggagatctaggctgcagtgcgccatgtttgtgccactgcattccagcctgggtaacagaatgagaccctgtctcaacaaaaaaagaaaagaaaagagaagaaaagagaaaagaaagacagggagggagggaggaaggaagggagggagggagggaaaatagagccaggcataaacttagaaagatcgtttggaggccaggcacaatggctcacacctgtaatcccagcactttgggaggccaaggcaagcagatcacctgaggtcaggagttcgagaccagcctaacatggagaaaccctgtctctactaaaaatacaaaattagccgggcgtggtggtgcattcctgtagtcctagctactcgggagcctgaggcaggagaatcacttgaacccgggaggcggaggttgcagtgagccgagatcatgccactgcactccagcctgggcgacaaggcgagactccatgccaaaaaagaaaaaaaactcctggcgcggtggctcacgccagtaatcccagcactgtgggaggctgagcaggcggatcacgaggtcaggagttcgagactagcctgctcaacataatgaaaccctctctgtactaaaaatacaaaaattagctgggtgtggtggcaggcacctgtagtcccagctactcgggaggctgaggcaggagaatggcttgaacctgggaggcagaggttgcagtgagccgagacagtgccattgcactccagtccaggtgacagagcgaaactccatctcaaaaaaaaaaggaaggcattggtagcaagagatggcaggccttgaaagccaggccagggtgaagtgtttcttttttttttttttttttttttctttttaaatttttttttttgagacggagtctcgctctgtcacccaggctggattgcagtggcctgatctcggctcactgcaagttccgcctcccgggttcatgccattctcctgcctcaccctcccgagtagctgggactacaggcacctgccaccacgccagctaattttttgtattcttagtagaatgtagaatttacttagtagaattttttgtattcttagccagcatggtctcgatctcctgacctggtgatccacccgcctcggcctcccaaagtgctgggattacaggcgtgagccacggcgcccggccttattttttctttttgagatgtacccagactggagtacagtggtgcgatctcggcttactggaacctccacctcccgggttcaggcaattctcctgcctcagcctcatgagtacttggaactacaggtgtgtgacaccacacatggtattttttgtatttttagtgaagatgacatttcaccatgttgcccaggttggtctcgaactcctgacctcaagtgatcagcctacctcggcctcccaaagtgttgggattacaggcgtgagccaaatgcccagccaagggtaaagtgtttagacttcaacgtgctttggtccatctgggaaactgaggcacagaagttggcccacccagcccagcggtcctcctaatcccacagacagtggggatggagattctgcaaggggaagaggtgggagtcaggtagcaggcagaatttggacagcctgggaggtagctgcacacagtgacccccttccttattcctccccacagggagtggttttcagagacatttcagaaagtgaaggagaaactcaagattgactcatgaggacctgaagggtgacatcccaggaggggcctctgaaatttcccacaccccagcgcctgtgctgaggactccctccatgtggccccaggtgccaccaataaaaatcctacagaaaattc
